(19) United States
(12) Patent Application Publication
(10) Pub. No.: US 2009/0263420 A1
(43) Pub. Date: Oct. 22, 2009

(54) Virus-Like Particles As Vaccines For Paramyxovirus

(75) Inventor: Trudy Morrison, Northborough, MA (US)

Correspondence Address: Peter G. Carroll;MEDLEN & CARROLL, LLP, Suite 350, 101 Howard Street, San Francisco, CA, 94105, US

(73) Assignee: University of Massachusetts Medical School

(21) Appl. No.: 12/329,159

(22) Filed: Dec. 5, 2008

Related U.S. Application Data
(63) Continuation-in-part of application No. 12/012,175, filed on Jan. 31, 2008.
Application No. 12/012,175 is a continuation-in-part of application No. 11/497,888, filed on Aug. 2, 2006.
(60) Provisional application No. 60/706,126, filed on Aug. 5, 2005.

(51) Int. Cl. A61K 39/12; C07K 14/005; C12N 15/63; C12P 21/06

(52) U.S. Cl. 424/204.1; 530/350; 435/320.1; 435/69.1

(57) ABSTRACT

The invention provides expression vectors and virus-like particles (VLPs) containing Newcastle Disease Virus Sequences in combination with sequences encoding proteins of interest. The vectors are useful in, for example, generating virus-like particles (VLPs) that contain proteins of interest. In one embodiment, the expressed VLPs elicit an immune response by an animal host against the protein. The invention's VLPs are useful as, for example, vaccines.

### STATEMENT OF GOVERNMENT SUPPORT

[0001] This work was supported by a grant from the National Institutes of Health AI 3 30572.

[0002] This application is a continuation-in-part of, and claims priority to, co-pending U.S. patent application Ser. No. 12/012,175, filed Jan. 31, 2008, which is a continuation-in-part of, and claims priority to, co-pending U.S. patent application Ser. No. 11/497,888, filed Aug. 2, 2006, which claims priority to provisional U.S. Application No. 60/706,126, filed Aug. 5, 2005, now abandoned, the contents of each of which are incorporated herein in their entirety.

### FIELD OF INVENTION

[0003] The present invention relates to the field of viral vaccines. In one embodiment, the present invention contemplates a paramyxoviral vaccine effective against diseases such as, but not limited to, Newcastle disease, measles, parainfluenza virus 3, and respiratory syncytial virus. In one embodiment, the present invention contemplates a vaccine comprising Newcastle disease virus (NDV)-like particles (VLP). In one embodiment, the present invention contemplates a method comprising transfecting avian cells with cDNAs encoding major NDV structural proteins. In another embodiment, a method wherein particles resembling infectious virions are released with nearly 100% efficiency. In one embodiment, the particles are non-infectious and provide a safe and effective NDV vaccine.

[0004] The invention further provides expression vectors that contain Newcastle disease virus nucleotide sequences that are useful for expression of proteins of interest, such as membrane proteins, soluble proteins, epitopes, and the like. The invention also provides methods for using these vectors to produce virus-like particles (VLPs) that contain the proteins of interest. Also provided are methods for using the virus-like particles (VLPs) for immunizing animals against a protein of interest.

### BACKGROUND

[0005] Over the last decade, a number of concerns have arisen related to safety issues regarding paramyxovirus vaccines that have had an adverse effect on the public's trust. These concerns affect not only parents whose children are the primary recipient of childhood disease vaccines, but also ranchers devoted to raising animals susceptible to various types of paramyxoviruses.

[0006] Historically, Newcastle disease has been a devastating disease of poultry, and in many countries the disease remains one of the major problems affecting existing or developing poultry industries. Even in countries where Newcastle disease may be considered to be controlled, an economic burden is still associated with vaccination and/or maintaining strict biosecurity measures. The variable nature of Newcastle disease virus strains in terms of virulence for poultry and the different susceptibilities of the different species of birds mean that for control and trade purposes, Newcastle disease requires careful definition. Confirmatory diagnosis of Newcastle Disease requires the isolation and characterization of the virus involved. Currently Newcastle disease control is limited to prevention of introduction and spread, good biosecurity practices and/or live attenuated virus vaccination. Newcastle disease viruses may infect humans, usually causing transient conjunctivitis, but human-to-human spread has never been reported. Alexander D. J., “Newcastle disease and other avian paramyxoviruses” Rev Sci Tech. 19(2):443-62 (2000).

[0007] Historically, the live attenuated measles virus (MV) vaccine and the combination multivalent measles, mumps, and rubella (MMR) vaccine have had a positive impact on the health of children worldwide by preventing infectious disease. The induction of an effective antiviral immune response using these live attenuated virus vaccines, however, are known to result in a significant rate of adverse events (i.e., for example, autism). Kennedy et al., “Measles virus infection and vaccination: potential role in chronic illness and associated adverse events” Crit Rev Immunol. 24(2): 129-56 (2004).

[0008] Healthy, and at risk, children are susceptible to the morbidity and mortality associated with viral-induced respiratory diseases, including respiratory syncytial virus (RSV) and influenza. Currently, the World Health Organization is attempting to develop and distribute effective vaccines to prevent/reduce key viral respiratory diseases. The progress, however, is slow and the risk/benefit ratio is high. A vaccination program for viral respiratory infections should include the prevention of lower respiratory tract infections and prevention of infection-associated morbidities, hospitalization and mortality. Presently, there are two influenza vaccines; i) a trivalent inactivated vaccine, and ii) a live, cold-adapted, attenuated vaccine. Compliancy, however, is relatively low (i.e., 10-30%). Because it is believed that the low compliancy is related to the known high risk of contaminated vaccines, those in the art recommend that research should continue into safe and effective vaccines for all childhood viral illnesses. Greenberg et al., “Immunization against viral respiratory disease: A review” Pediatr Infect Dis J. 23 (11 Suppl): S254-61 (2004).

[0009] What is needed in the art is a low risk, highly effective paramyxovirus vaccine that is compatible with population-wide distribution marketing goals of low cost and high production rates.

### SUMMARY

[0010] The present invention relates to the field of viral vaccines. In one embodiment, the present invention contemplates a paramyxoviral vaccine effective against diseases such as, but not limited to, Newcastle disease, measles, parainfluenza virus 3, and respiratory syncytial virus. In one embodiment, the present invention contemplates a vaccine comprising Newcastle disease virus-like particles (VLP). In one embodiment, the present invention contemplates a method comprising transfecting avian cells with cDNAs encoding major NDV structural proteins. In another embodiment, a method wherein particles resembling infectious virions are released with nearly 100% efficiency. In one embodiment, the particles are non-infectious and provide a safe and effective NDV vaccine.

[0011] The invention is premised, in part, on the inventor's discovery that the ectodomain of the RSV G protein can be efficiently incorporated into Newcastle Disease VLPs (Example 39), that chimeric NDV HN/RSV G VLPs (referred to as VLP-H/G) stimulate a better antibody response to the RSV G protein than a comparable amount of UV inactivated RSV or live RSV (Example 40), that VLP-H/Ga immunization results in antibody responses, which protect mice from viral replication in the lungs (Example 41), and that there is no unusual inflammation after RSV infection of VLP-H/Ga immunized mice (Example 42).

[0012] Therefore, in one embodiment, the invention provides a recombinant virus-like particle (VLP) comprising a chimeric protein, wherein the chimeric protein comprises an RSV ectodomain protein operably linked to one or more Newcastle disease virus proteins. In a particular embodiment, the recombinant virus-like particle (VLP) comprises a) a Newcastle disease virus (NDV) matrix (M) protein, b) a NDV transmembrane domain (TM) protein, c) a NDV cytoplasmic domain (CT) protein, and d) a Respiratory Syncytial Virus (RSV) ectodomain protein, wherein the transmembrane (TM) protein is flanked by the cytoplasmic domain (CT) protein and the ectodomain protein. In one embodiment, the VLP further comprises a NDV nucleocapsid (NP) protein (Example 39). In a particular embodiment, the NDV nucleocapsid (NP) protein comprises one or more of SEQ ID NO:12 (FIG. 11, GenBank Accession No. AY728363), NDV fusion (F) protein, and NDV heamagglutinin-neuraminidase (HN) protein. In one embodiment the RSV ectodomain is a human RSV G protein ectodomain. In another preferred embodiment, the NDV TM protein and the NDV CT protein are operably linked to the human RSV G protein ectodomain. In a particular embodiment, the NDV matrix (M) protein comprises SEQ ID NO:6 (FIG. 8, GenBank Accession No. AB124608). In a further embodiment, the NDV transmembrane domain (TM) protein comprises IAILLLTVMTLAISAAALAYS (SEQ ID NO:386). In yet another embodiment, the NDV cytoplasmic (CT) protein comprises MNRAVCQVALENDEREAKNTWRLVFR (SEQ ID NO:117 of Table 5). While not intending to limit the ectodomain's RSV to any particular strain, certain preferred embodiments comprise RSV strain a (FIG. 241-242), such as an ectodomain protein that comprises SEQ ID NO:387. Other embodiments comprise RSV strain b (FIG. 243), such as ectodomain protein that comprises SEQ ID NO:391. In a particularly preferred embodiment, The a) the NDV matrix (M) protein comprises SEQ ID NO:6 (FIG. 8, GenBank Accession No. AB124608), b) the NDV transmembrane domain (TM) protein comprises IAILLLTVMTLAISAAALAYS (SEQ ID NO:386), c) the NDV cytoplasmic domain (CT) protein comprises MNRAVCQVALENDEREAKNTWRLVFR (SEQ ID NO: 117 of Table 5), d) the Respiratory Syncytial Virus (RSV) ectodomain protein is selected from the group consisting of SEQ ID NO:387 and SEQ ID NO:391, and e) the NDV nucleocapsid (NP) protein comprises SEQ ID NO:12 (FIG. 11, GenBank Accession No. AY728363). In particular embodiments, the VLP is purified. In yet other embodiments, the VLP is immunogenic. In additional embodiments, the VLP is comprised in a vaccine.

[0013] The invention also provides a recombinant expression vector comprising a nucleotide sequence that encodes one or more of the VLPs described herein, as well as a vaccine comprising one or more of the VLPs described herein. In one embodiment, the vaccine further comprises an adjuvant.

[0014] In addition, the invention provides a recombinant chimeric protein that comprises an RSV ectodomain protein operably linked to one or more Newcastle disease virus proteins. In a particular embodiment, the recombinant chimeric protein comprises a) a Newcastle disease virus (NDV) matrix (M) protein, b) a NDV transmembrane domain (TM) protein, c) a NDV cytoplasmic domain (CT) protein, and d) a Respiratory Syncytial Virus (RSV) ectodomain protein, wherein the transmembrane (TM) protein is flanked by the cytoplasmic domain (CT) protein and the ectodomain protein. The recombinant chimeric protein may optionally further contain one or more of NDV nucleocapsid (NP) protein (Example 39), NDV fusion (F) protein, and NDV heamagglutinin-neuraminidase (HN) protein.

[0015] The invention also provides a method for producing a Respiratory Syncytial Virus (RSV) ectodomain protein, comprising a) providing an expression vector comprising, in operable combination, 1) a first nucleic acid sequence encoding a Newcastle disease virus (NDV) transmembrane domain (TM) protein, 2) a second nucleic acid sequence encoding NDV cytoplasmic domain (CT) protein, 3) a third nucleic acid sequence encoding a Respiratory Syncytial Virus (RSV) ectodomain protein, wherein the first nucleic acid sequence is flanked by the second and third nucleic acid sequences, and 4) a fourth nucleic acid sequence encoding NDV matrix (M) protein, b) providing a target host cell, and c) transfecting the target host cell with the vector to produce a transfected host cell that produces virus-like particles (VLPs) that comprise the RSV ectodomain protein. In particular embodiment, the expression vector further comprises, in operable combination, a fifth nucleic acid sequence encoding a NDV nucleocapsid (NP) protein (Example 39). In yet a further embodiment, the NDV nucleocapsid (NP) protein comprises one or more of SEQ ID NO:12 (FIG. 11, GenBank Accession No. AY728363), NDV fusion (F) protein, and NDV heamagglutinin-neuraminidase (HN) protein. In a particular embodiment, the NDV matrix (M) protein comprises SEQ ID NO:6 (FIG. 8, GenBank Accession No. AB124608). In a further embodiment, the NDV transmembrane domain (TM) protein comprises IAILLLTVMTLAISAAALAYS (SEQ ID NO:386). In yet another embodiment, the NDV cytoplasmic (CT) protein comprises MNRAVCQVALENDEREAKNTWRLVFR (SEQ ID NO: 117 of Table 5). While not intending to limit the ectodomain's RSV to any particular strain, certain preferred embodiments comprise RSV strain a (FIG. 241-242), such as an ectodomain protein that comprises SEQ ID NO:387. Other embodiments comprise RSV strain b (FIG. 243), such as ectodomain protein that comprises SEQ ID NO:391. In a particularly preferred embodiment, The a) the NDV matrix (M) protein comprises SEQ ID NO:6 (FIG. 8, GenBank Accession No. AB124608), b) the NDV transmembrane domain (TM) protein comprises IAILLLTVMTLAISAAALAYS (SEQ ID NO:386), c) the NDV cytoplasmic domain (CT) protein comprises MNRAVCQVALENDEREAKNTWRLVFR (SEQ ID NO:117 of Table 5), d) the Respiratory Syncytial Virus (RSV) ectodomain protein is selected from the group consisting of SEQ ID NO:387 and SEQ ID NO:391, and e) the NDV nucleocapsid (NP) protein comprises SEQ ID NO:12 (FIG. 11, GenBank Accession No. AY728363). In some embodiments, the invention's methods further comprise step d) purifying the VLPs. In particular embodiments, the invention methods produce VLPs that are immunogenic. Data herein in Example 40 show that the VLPs produce RSV-specific antibodies, and in Example 41 show that animals immunized with the invention's VLPs are protected against RSV challenge. The invention also provides a transfected cell and/or a VLP produced by the invention's methods

[0016] The inventor additionally discovered that including a glycosaminoglycan (e.g., heparin) significantly increased (approximately 10-fold) the number of released VLPs from transfected cells (Example 39). While an understanding of the invention's mechanism is not necessary, and without intending to limit the invention to any particular mechanism, it is the inventor's view that heparin competes for the G protein attachment to glycosaminoglycans on cell surfaces facilitating the release of the particles from cell surfaces. Thus, in particular embodiments, the invention's methods further comprise contacting the transfected host cell with a glycosaminoglycan, exemplified by, but not limited to the group consisting of heparin, heparin sulfate, chondroitin sulfate B (also known as dermatin sulfate), hyaluronic acid, and keratan sulfate. In particular embodiments, the glycosaminoglycan comprises heparin (Example 39). While not intending to limit its concentration, in some embodiments the glycosaminoglycan is at a concentration of from 1 to 100 μg/ml (micrograms per milliliter), preferably from 2 to 50 μg/ml, and more preferably at 10 μg/ml. In certain embodiments, contacting the transfected cells with the glycosaminoglycan is under conditions that produce an increase in the number of the VLPs compared to the number of the VLPS in the absence of the contacting. Thus, in particular embodiments, the increase is from 2 fold to 50 fold, including an increase of 10 fold.

[0017] The invention also provides a method for producing a Respiratory Syncytial Virus (RSV) ectodomain protein, comprising a) providing a first expression vector comprising, in operable combination, 1) a first nucleic acid sequence encoding a Newcastle disease virus (NDV) transmembrane domain (TM) protein, 2) a second nucleic acid sequence encoding NDV cytoplasmic domain (CT) protein, and 3) a third nucleic acid sequence encoding a Respiratory Syncytial Virus (RSV) ectodomain protein, wherein the first nucleic acid sequence is flanked by the second and third nucleic acid sequences, b) providing a second expression vector comprising a fourth nucleic acid sequence encoding NDV matrix (M) protein, c) providing a target host cell, and d) transfecting the target host cell with the first and second vectors to produce a transfected host cell that produces virus-like particles (VLPs) that comprise the RSV ectodomain protein.

[0018] Also provided herein is a method for immunizing an animal against Respiratory Syncytial Virus, comprising a) providing 1) a vaccine comprising any one or more of the VLPs described herein that contain one or more RSV protein, and 2) an animal, and b) administering the vaccine to the animal to produce an immune response against the Respiratory Syncytial Virus (Examples 40-42). In one embodiment, the immune response comprises antibody that specifically binds to the RSV ectodomain protein. In another embodiment, the immune response comprises T lymphocytes that specifically bind to the RSV ectodomain protein.

[0019] In one embodiment, the present invention contemplates a method, comprising; a) providing, i) an expression vector comprising DNA sequences encoding a Newcastle disease matrix protein; ii) a cell capable of being transfected by said vector; b) transfecting said cell with said vector under conditions such that Newcastle disease virus-like particles are generated. In one embodiment, the method further comprises the step c) harvesting said virus-like particles so as to create a cell-free preparation of particles. In one embodiment, the method further comprises the step d) administering a vaccine comprising said preparation of particles to a chicken. In one embodiment, the cell is part of a cell culture and said harvesting comprises obtaining said particles from the supernatant of said culture. In one embodiment, the cell culture comprises sub-confluent avian cells. In one embodiment, the vector further comprises DNA sequences encoding additional Newcastle disease viral proteins selected from the group consisting of a nucleocapsid protein, a fusion protein, and a hemagglutinin-neuraminidase protein. In one embodiment, the particles are free of Newcastle disease viral DNA.

[0020] In one embodiment, the present invention contemplates a transfected cell comprising an expression vector comprising DNA sequences encoding a Newcastle disease matrix protein capable of generating Newcastle disease virus-like particles.

[0021] In one embodiment, the present invention contemplates a cell-free preparation of virus like particles harvested from a transfected cell comprising an expression vector comprising DNA sequences encoding a Newcastle disease matrix protein capable of generating Newcastle disease virus-like particles.

[0022] In one embodiment, the present invention contemplates a method, comprising;

a) providing, i) a vaccine comprising Newcastle disease virus-like particles, said particles comprising a Newcastle disease viral matrix protein; ii) a host susceptible to Newcastle disease; b) immunizing said host with said vaccine under conditions such that antibodies directed to said virus-like particle are produced. In one embodiment, the host is selected from the group consisting of avian, murine, and human. In one embodiment, the particles further comprise one or more additional Newcastle disease viral proteins selected from the group consisting of a fusion protein, a nucleocapsid protein and a hemagglutinin-neuraminidase protein.

[0023] In one embodiment, the present invention contemplates a vaccine comprising Newcastle disease virus-like particles, said particles comprising a Newcastle disease viral matrix protein. In one embodiment, the particles are free of Newcastle disease viral DNA. In one embodiment, the particles further comprise one or more additional viral proteins selected from the group consisting of a fusion protein, nucleocapsid protein and a hemagglutinin-neuraminidase protein.

[0024] In one embodiment, the present invention contemplates a vaccine comprising a Newcastle disease virus-like particle and a Newcastle disease matrix protein. In one embodiment, the vaccine further comprises at least two viral glycoproteins. In one embodiment, the glycoproteins are selected from the group consisting of a fusion protein and a hemagglutinin-neuraminidase protein. In one embodiment, the vaccine further comprises a nucleocapsid protein. In one embodiment, the matrix protein comprises a Late Domain. In one embodiment, the Late Domain comprises an FPIV sequence (SEQ ID NO:1). In one embodiment, the Late Domain comprises a PXXP sequence (SEQ ID NO:2). In one embodiment, the Late Domain comprises an YXXL sequence (SEQ ID NO:3). In one embodiment, the vaccine is non-infectious.

[0025] One embodiment of the present invention contemplates an avian vaccine comprising a Newcastle disease virus-like particle and a Newcastle disease matrix protein. In one embodiment, the vaccine further comprises at least two viral glycoproteins. In one embodiment, said glycoproteins are selected from the group comprising a fusion protein and a hemagglutinin-neuraminidase protein. In one embodiment, the vaccine further comprises a nucleocapsid protein. In one embodiment, said virus-like particle comprises a Paramyxovirus virus-like particle. In one embodiment, said Paramyxovirus virus-like particle comprises a Newcastle disease virus-like particle. In one embodiment, said matrix protein comprises a Late Domain. In one embodiment, said Late Domain comprises an FPIV sequence (SEQ ID NO:1). In one embodiment, said Late Domain comprises a PXXP sequence (SEQ ID NO:2). In one embodiment, said Late Domain comprises an YXXL sequence (SEQ ID NO:3). In one embodiment, said virus-like particle is non-infectious.

[0026] In one embodiment, the present invention contemplates a method, comprising;

a) providing, i) an expression vector comprising cDNA sequences encoding a Newcastle disease virus matrix protein and at least two viral glycoproteins; ii) a cell capable of being transfected by said vector; b) transfecting said cell by said vector under conditions that generate a Newcastle disease virus-like particle, wherein said particle comprises said matrix protein. In one embodiment, the cell comprises sub-confluent avian cells. In one embodiment, the expression vector comprises pCAGGS. In one embodiment, the glycoproteins are selected from the group consisting of a fusion protein and a hemagglutinin-neuraminidase protein. In one embodiment, the expression vector further comprises a cDNA sequence encoding a nucleocapsid protein. In one embodiment, the method further comprises releasing said virus-like particle at an efficiency of at least 85%. In one embodiment, the virus-like particle further comprises said at least two viral glycoproteins.

[0027] One embodiment of the present invention contemplates a method, comprising; a) providing, i) an expression vector comprising cDNA sequences encoding a Newcastle disease virus matrix protein and at least two viral glycoproteins; ii) a cell capable of being transfected by said vector; and b) transfecting said cell by said vector under conditions that generate an avian vaccine comprising a virus-like particle. In one embodiment, said cell comprises sub-confluent avian cells. In one embodiment, said cell comprises human cells. In one embodiment, said expression vector comprises pCAGGS. In one embodiment, said glycoproteins are selected from the group comprising a fusion protein and a hemagglutinin-neuraminidase protein. In one embodiment, the vector further comprises a cDNA sequence encoding a nucleocapsid protein. In one embodiment, the method further comprises releasing said virus-like particle at an efficiency of at least 85%. In one embodiment, said virus-like particle comprises said matrix protein and said at least two viral glycoproteins.

[0028] In one embodiment, the present invention contemplates a method, comprising;

a) providing, i) a vaccine comprising a Newcastle disease virus-like particle and a Newcastle disease virus matrix protein and at least two viral glycoproteins; ii) a host capable of immunization by said virus-like particle; b) immunizing said host by said virus-like particle under conditions such that antibodies directed to said virus-like particle are produced. In one embodiment, the host is selected from the group consisting of avian, murine, and human. In one embodiment, the glycoproteins are selected from the group consisting of a fusion protein, and a hemagglutinin-neuraminidase protein. In one embodiment, the vaccine further comprises a nucleocapsid protein.

[0029] One embodiment of the present invention contemplates a method, comprising; a) providing, i) an avian vaccine comprising a Newcastle disease virus virus-like particle, a Newcastle disease virus matrix protein and at least two viral glycoproteins; ii) a host capable of immunization by said virus-like particle; b) immunizing said host by said vaccine under conditions such that antibodies directed to said virus-like particle are produced. In one embodiment, said host is selected from the group comprising avian, murine, and human. In one embodiment, said virus-like particle comprises a Newcastle disease virus-like particle. In one embodiment, said glycoproteins are selected from the group comprising a fusion protein, and a hemagglutinin-neuraminidase protein. In one embodiment, the vaccine further comprises a nucleocapsid protein.

[0030] In one embodiment, the present invention contemplates an VLP vaccine expression system comprising a first cDNA encoding a first viral protein from a first Newcastle disease virus strain; a second cDNA encoding a second viral protein from a second Newcastle disease virus strain; and a third cDNA encoding a third viral protein from a third strain. In one embodiment, the first viral protein is selected from the group comprising HN protein, F protein, NP protein or M protein. In one embodiment, the first strain is selected from the group comprising strain Hertz, strain AV, or strain B1. In one embodiment, the second viral protein gene is selected from the group comprising HN protein, F protein, NP protein or M protein. In one embodiment, the second strain is selected from the group comprising strain Hertz, strain AV, or strain B1. In one embodiment, the third viral protein is selected from the group comprising HN protein, F protein, NP protein or M protein. In one embodiment, the third strain is selected from the group comprising strain Hertz, strain AV, or strain B1. In one embodiment, the present invention contemplates a method for detecting a viral protein and/or gene incorporated into a VLP vaccine comprising contacting the viral protein gene with strain specific antibodies or incorporated sequence tags.

[0031] The invention provides a expression vector comprising, in operable combination: a) a first nucleic acid sequence encoding a Newcastle Disease Virus matrix (M) protein, b) a second nucleic acid sequence encoding a transmembrane domain (TM) protein, c) a third nucleic acid sequence encoding Newcastle Disease Virus cytoplasmic domain (CT) protein, and d) a fourth nucleic acid sequence encoding a protein of interest or portion thereof, wherein the second nucleic acid sequence is flanked by the third and fourth nucleic acid sequences. Without intending to limit the number of nucleotides between the second and fourth sequence, and between the second and third sequences, in one embodiment, the vector further comprises from 0 to 30 nucleotides between the second and fourth nucleic acid sequences. In another embodiment, the vector further comprises from 0 to 3 nucleotides between the second and fourth nucleic acid sequences. In yet a further embodiment, the vector further comprises from 0 to 10 nucleotides between the second and third nucleic acid sequences.

[0032] While not intending to limit the source of the second nucleotide sequence encoding the transmembrane domain (TM) protein, in one embodiment, the second nucleic acid sequence encodes one or more Newcastle Disease Virus fusion (F) protein transmembrane domain (TM) protein. In another embodiment, the second nucleic acid sequence encodes one or more Newcastle Disease Virus heamagglutinin-neuraminidase (HN) protein transmembrane domain (TM) protein. In yet another alternative embodiment, the second nucleic acid sequence encodes one or more transmembrane domain (TM) protein selected from the group exemplified by the transmembrane domain of influenza virus HA protein, influenza virus NA protein, G protein-coupled receptor, leucine zipper EF hand receptor, Escherichia coli LipoF protein, Escherichia coli OmpF protein, Escherichia coli OmpA protein, human T cell receptor α chain, HLA class I protein, human MHC HLA-G protein, squalene synthetase, CD4 protein, and CD8 protein.

[0033] Without limiting the source of the third nucleotide sequence encoding the cytoplasmic domain (CT) protein, in one embodiment, the third nucleic acid sequence encodes a Newcastle Disease Virus fusion (F) protein cytoplasmic domain (CT) protein. In another embodiment, the third nucleic acid sequence encodes a Newcastle Disease Virus heamagglutinin-neuraminidase (HN) protein cytoplasmic domain (CT) protein.

[0034] To illustrate, but not limit, the source of the protein of interest, in one embodiment, the protein of interest comprises a membrane protein. In another embodiment, the membrane protein is selected from the group exemplified in Tables 6-11. In an alternative embodiment, the protein of interest comprises an ectodomain of a membrane protein. In yet another embodiment, the ectodomain is selected from the group exemplified in Tables 7, 9 and 11, and in U.S. Pat. Nos. 7,262,270; 7,253,254; 7,250,171; 7,223,390; 7,189,403; 7,122,347; 7,119,165; 7,101,556; 7,067,110; 7,060,276; 7,029,685; 7,022,324; 6,946,543; 6,939,952; 6,713,066; 6,699,476; 6,689,367; 6,566,074; 6,531,295; 6,417,341; 6,248,327; 6,140,059; 5,851,993; 5,847,096; 5,837,816; 5,674,753; and 5,344,760.

[0035] In one embodiment, the membrane protein comprises a type 1 protein. In another embodiment, the type 1 protein is selected from the group exemplified in Table 6. In a further embodiment, the protein of interest comprises an ectodomain of a type 1 protein. In yet another embodiment, the ectodomain of a type 1 protein is selected from the group exemplified in Table 7. In a further embodiment, the ectodomain comprises SEQ ID NO:251.

[0036] In an alternative embodiment, the membrane protein comprises a type 2 protein. In another embodiment, the type 2 protein is selected from the group exemplified in Table 8. In a further embodiment, the protein of interest comprises an ectodomain of a type 2 protein. In yet another embodiment, the ectodomain of a type 2 protein is selected from the group exemplified in Table 9. In a particular embodiment, the ectodomain comprises SEQ ID NO: 270.

[0037] In another alternative embodiment, the membrane protein comprises a type 3 protein. In one embodiment, the type 3 protein is selected from the group exemplified in Table 10. In an alternative embodiment, the protein of interest comprises an ectodomain of a type 3 protein. In a further embodiment, the ectodomain of a type 3 protein is selected from the group exemplified in Table 11.

[0038] In another example, and without limiting, the source of the protein of interest, in one embodiment, the protein of interest comprises a soluble protein. In one embodiment, the soluble protein is selected from the group exemplified in Table 12.

[0039] Also without limiting the source of the protein of interest, in one embodiment, the protein of interest comprises an epitope. In one embodiment, the epitope is selected from the group exemplified by YPYDVPDYA (SEQ ID NO: 227), EphrinA2 epitopes, hepatitis C virus epitopes, vaccinia virus epitopes, dog dander epitopes, human papilloma virus (HPV) epitopes, Mycobacterium tuberculosis epitopes, bacterial meningitis epitopes, malaria epitopes, and type 1 diabetes mellitus epitopes.

[0040] In one embodiment for expressing, for example, type 1 proteins, type 3 proteins, soluble proteins, and epitopes, the third nucleic acid sequence encodes a Newcastle Disease Virus fusion (F) protein cytoplasmic domain (CT) protein, and wherein the fourth nucleic acid sequence encodes a type 1 protein, type 3 protein, soluble protein, and/or epitopes. In another embodiment, the second nucleic acid sequence encodes a Newcastle Disease Virus fusion (F) protein transmembrane domain (TM) protein. In yet a further embodiment, the vector further comprises Newcastle Disease Virus nucleocapsid (NP) protein. In an alternative embodiment, the vector further comprises Newcastle Disease Virus fusion (F) protein. In another alternative, the vector further comprises Newcastle Disease Virus heamagglutinin-neuraminidase (HN) protein.

[0041] In another embodiment for expressing, for example, type 2 proteins, type 3 proteins, soluble proteins, and epitopes, the third nucleic acid sequence encodes a Newcastle Disease Virus heamagglutinin-neuraminidase (HN) protein cytoplasmic domain (CT) protein, and wherein the fourth nucleic acid sequence encodes a type 2 protein, type 3 protein, soluble protein, and/or epitope. In one embodiment, the second nucleic acid sequence encodes a Newcastle Disease Virus heamagglutinin-neuraminidase (HN) protein transmembrane domain (TM) protein. In a further embodiment, the vector further comprises Newcastle Disease Virus nucleocapsid (NP) protein. In yet another embodiment, the vector further comprises Newcastle Disease Virus fusion (F) protein. In an alternative embodiment, the vector further comprises Newcastle Disease Virus fusion (F) protein and Newcastle Disease Virus heamagglutinin-neuraminidase (HN) protein.

[0042] In a further embodiment for expressing, for example and without limitation, soluble proteins, type 3 proteins, and epitopes, in one embodiment, the second nucleic acid sequence encodes a Newcastle Disease Virus fusion (F) protein transmembrane domain (TM) protein, and wherein the third nucleic acid sequence encodes a Newcastle Disease Virus fusion (F) protein cytoplasmic domain (CT) protein. In an alternative embodiment, the second nucleic acid sequence encodes a Newcastle Disease Virus heamagglutinin-neuraminidase (HN) protein transmembrane domain (TM) protein, and wherein the third nucleic acid sequence encodes a Newcastle Disease Virus heamagglutinin-neuraminidase (HN) protein cytoplasmic domain (CT) protein.

[0043] Without limiting the sequence of the Newcastle Disease Virus matrix (M) protein used in the invention's vectors, in one embodiment, the Newcastle Disease Virus matrix (M) protein is selected from the group of sequences exemplified in Table 13.

[0044] The invention also provides a cell comprising any of the vectors disclosed herein. In one embodiment, the cell is selected from avian cell, insect cell, and mammalian cell. In another embodiment, the avian cell is an ELL-0 cell (East Lansing Strain of Chicken embryo fibroblast) or an egg cell. In a further embodiment, the insect cell is selected from the group exemplified by Trichoplusia ni (Tn5) cell and SF9 cell. In a further embodiment, the mammalian cell is selected from the group exemplified by Chinese hamster ovary CHO-K1 cells, bovine mammary epithelial cells, monkey COS-7 cells, human embryonic kidney 293 cells, baby hamster kidney (BHK) cells, mouse sertoli TM4 cells, monkey kidney CV1 cells, African green monkey kidney VERO-76 cells, human cervical carcinoma HELA cells, canine kidney MDCK cells, buffalo rat liver BRL 3A cells, human lung W138 cells, human liver Hep G2 cells, mouse mammary tumor (MMT) cells, TR1 cells, MRC 5 cells, FS4 cells, rat fibroblasts 208F cells, an bovine kidney MDBK cells. The cell may be in vitro or in vivo.

[0045] The invention additionally provides recombinant virus-like particle (VLP) produced by expression of any of the vectors disclosed herein. In one embodiment, the recombinant virus-like particle (VLP) comprises: a) a Newcastle disease virus matrix (M) protein, b) a transmembrane domain (TM) protein, c) a Newcastle Disease Virus cytoplasmic domain (CT) protein, and d) a protein of interest, wherein the transmembrane (TM) protein is flanked by the cytoplasmic domain (CT) protein and the protein of interest. In one embodiment, the virus-like particle (VLP) is purified. In another embodiment, the protein of interest is expressed on the outside surface of the virus-like particle (VLP). In a further embodiment, the virus-like particle (VLP) is immunogenic.

[0046] While not intending to limit the source or type of transmembrane (TM) protein, in one embodiment, the transmembrane (TM) protein comprises a Newcastle Disease Virus fusion (F) protein transmembrane domain (TM) protein. In an alternative embodiment, the transmembrane (TM) protein comprises a Newcastle Disease Virus heamagglutinin-neuraminidase (HN) protein transmembrane domain (TM) protein. In a further embodiment, the transmembrane (TM) protein comprises a sequence exemplified by those discussed supra, and herein.

[0047] Also without intending to limit the source or type of cytoplasmic domain (CT) protein, in one embodiment, the cytoplasmic domain (CT) protein comprises a Newcastle Disease Virus fusion (F) protein cytoplasmic domain (CT) protein. In an alternative embodiment, the cytoplasmic domain (CT) protein comprises Newcastle Disease Virus heamagglutinin-neuraminidase (RN) protein cytoplasmic domain (CT) protein. In a further embodiment, the cytoplasmic domain (CT) protein comprises a sequence exemplified by those discussed supra, and herein.

[0048] To illustrate, but not limit, the source and type of Newcastle disease virus matrix (M) protein and protein of interest, these proteins are exemplified by those discussed supra, and herein.

[0049] In one embodiment, such as where the invention's virus-like particles (VLPs) contain a type 1 protein, type 3 protein, soluble protein, and/or epitope, the VLP contains a Newcastle Disease Virus fusion (F) protein cytoplasmic domain (CT) protein. In another embodiment, the VLP further comprises a Newcastle Disease Virus fusion (F) protein transmembrane domain (TM) protein. In a further embodiment, the VLP further comprises Newcastle Disease Virus nucleocapsid (NP) protein. In an alternative embodiment, the VLP further comprises Newcastle Disease Virus fusion (F) protein. In yet another embodiment, the VLP further comprises Newcastle Disease Virus heamagglutinin-neuraminidase (HN) protein.

[0050] In one embodiment, such as where the invention's virus-like particles (VLPs) contain a type 2 protein, type 3 protein, soluble protein, and/or epitope, the VLP contains a Newcastle Disease Virus heamagglutinin-neuraminidase (HN) protein cytoplasmic domain (CT) protein. In a further embodiment, the VLP further contains a Newcastle Disease Virus heamagglutinin-neuraminidase (HN) protein transmembrane domain (TM) protein. In yet another embodiment, the VLP further comprises Newcastle Disease Virus nucleocapsid (NP) protein. In a further embodiment, the VLP further comprises Newcastle Disease Virus fusion (F) protein. In yet another embodiment, the VLP further comprises Newcastle Disease Virus fusion (F) protein and Newcastle Disease Virus heamagglutinin-neuraminidase (HN) protein

[0051] In a further embodiment, such as where the invention's virus-like particles (VLPs) contain a type 3 protein, soluble protein, and/or epitope, the VLP comprises a transmembrane domain (TM) protein (such as from Newcastle Disease Virus fusion (F) protein), and a Newcastle Disease Virus fusion (F) protein cytoplasmic domain (CT) protein. In an alternative embodiment, the VLP comprises a transmembrane domain (TM) protein (such as from Newcastle Disease Virus heamagglutinin-neuraminidase (HN) protein), and a Newcastle Disease Virus heamagglutinin-neuraminidase (HN) protein cytoplasmic domain (CT) protein.

[0052] The invention also provides a vaccine comprising any of the virus-like particles (VLPs) disclosed herein.

[0053] Also provided by the invention is a method for producing a protein, comprising: a) providing a first expression vector comprising, in operable combination: 1) a first nucleic acid sequence encoding a transmembrane domain (TM) protein, 2) a second nucleic acid sequence encoding Newcastle Disease Virus cytoplasmic domain (CT) protein, and 3) a third nucleic acid sequence encoding a protein of interest, wherein the first nucleic acid sequence is flanked by the second and third nucleic acid sequences, b) providing a second expression vector comprising a fourth nucleic acid sequence encoding Newcastle Disease Virus matrix (M) protein, wherein the first and second expression vectors are the same or different, c) providing a host cell capable of being transfected by the vector, and d) transfecting the host cell with the first and second vectors to produce virus-like particles (VLPs) comprising the protein of interest. In one embodiment, the method further comprises step e) purifying the virus-like particles (VLPs). In another embodiment, the protein of interest is expressed on the outside surface of the virus-like particle (VLP). In one embodiment, the virus-like particle (VLP) is immunogenic.

[0054] While not intending to limit the invention's methods to any particular range of efficiency, in one embodiment, the efficiency of producing the invention's virus-like particles (VLPs) is at least 10 fold greater, at least 20 fold greater, and/or at least 30 fold greater than the efficiency of producing influenza virus-like particles (VLPs).

[0055] The invention also provides a method for immunizing an animal host, comprising: a) providing: 1) a vaccine comprising any of the virus-like particles (VLPs) disclosed herein, and 2) an animal host, and b) administering the vaccine to the animal host to produce an immune response. In one embodiment, the animal host is selected from the group of mammal, avian, amphibian, reptile, and insect. In one embodiment, the immune response comprises an antibody that specifically binds to the protein of interest. In another embodiment, the immune response comprises T lymphocytes that specifically bind to the protein of interest.

[0056] The invention also provides antibodies produced by the invention's methods.

### DEFINITIONS

[0057] The terms used within the present invention are generally used according to those definitions accepted by one having ordinary skill in the art, with the following exceptions:

[0058] The term “virus-like particle” as used herein, refers to a non-infective viral subunit either with, or without, viral proteins. For example, a virus-like particle may completely lack the DNA or RNA genome. Further, a virus-like particle comprising viral capsid proteins may undergo spontaneous self-assembly. Preparations of virus-like particles are contemplated in one embodiment, where the preparation is purified free of infectious virions (or at least substantially free, such that the preparation has insufficient numbers to be infectious). Thus, the term “virus-like particle” and “VLP” includes a non-replicating viral shell that resembles live virus in external conformation. Methods for producing and characterizing recombinantly produced VLPs have been described for VLPs from several viruses, including human papilloma virus type 1 (Hagnesee et al. (1991) J. Virol. 67:315), human papilloma virus type 16 (Kirubauer et al. Proc. Natl. Acad. Sci. (1992)89:12180), HIV-1 (Haffer et al., (1990) J. Virol. 64:2653), and hepatitis A (Winokur (1991) 65:5029). Additional methods for expressing VLPs that contain Newcastle Disease virus proteins are provided by Pantua et al. (2006) J. Virol. 80:11062-11073, and disclosed herein.

[0059] The term “matrix protein”, “membrane protein”, or “M protein” as used herein, means any protein localized between the envelope and the nucleocapsid core and facilitates the organization and maintenance of the virion structure and budding processes.

[0060] The term “fusion protein” or “F protein” as used herein, means any protein that projects from the envelope surface and mediates host cell entry by inducing fusion between the viral envelope and the cell membrane. However, it is not intended that the present invention be limited to functional F proteins. For example, an F protein may be encoded by a mutant F gene such as, but not limited to, F-K115Q. F-K115Q is believed to eliminate the normal cleavage and subsequent activation of the fusion protein. F-K115Q mimics naturally occurring F-protein mutations in avirulent NDV strains, and in cell culture, eliminates any potential side effects of cell-cell fusion on the release of VLPs. Exemplary NDV F protein sequences include those comprising SEQ ID NO:10 (FIG. 10A) that is encoded by SEQ ID NO:11 (FIG. 10B), comprising SEQ ID NO:19 (FIG. 22A) (ATCC M21881), encoded by SEQ ID NO:20 (FIG. 22B), and SEQ ID NO:21 (FIG. 23) (ATCC AAG36978), and the following ATCC Accession numbers: AAA46642 (strain Texas GB), CAA00288 (strain Chambers), AB065262 (strain JL01), AAS00690 (strain F48E9), AAA46642 (strain Texas GB), CAF32456 (strain La Sota), AAC62244 (strain DB5), AAC62243 (strain DB3), AAC28467 (strain F48E9), ABY41269 (strain D58), ABV60351 (strain SNV-5074), AAL18935 (strain ZJ1), and AAY43057 (strain FM1/03).

[0061] The term “nucleocapsid protein” or “NP protein” as used herein, means any protein that associates with genomic RNA (i.e., for example, one molecule per hexamer) and protects the RNA from nuclease digestion. Exemplary NP protein sequences from NDV include those comprising SEQ ID NO:6 (FIG. 8A) encoded by SEQ ID NO:7 (FIG. 8B) (ATCC No. AB124608), SEQ ID NO:22 (FIG. 24A) encoded by SEQ ID NO:23 (FIG. 24B) (ATCC No. AF060483), and the following ATCC Accession Nos. P09459 (strain Beaudette C), Q99FY3 (strain AF2240), NP_{—}071466 (strain B1), ABG35929 (strain chicken/China/Guangxil/2000), AA276405 (strain PNY-LMV42), CAB51322 (strain clone 30), AB032476 (strain F), AAW30676 (strain LaSota), AA04779 (strainV4), BAD16677 (strainAPMV1/Quail/Japan/Chiba/2001), and BAD 16672 (strain APMV1/chicken/Japan/Niiga/89).

[0062] The term “haemagglutinin-neuraminidase protein”, “HN protein”, or G protein as used herein, means any protein that spans the viral envelope and projects from the surface as spikes to facilitate cell attachment and entry (i.e., for example, by binding to sialic acid on a cell surface). These proteins possess both haemagglutination and neuraminidase activity. Exemplary NDV HN protein sequences include those comprising SEQ ID NO:8 (FIG. 9A) encoded by SEQ ID NO:9 (FIG. 9B), and those encoded by the mRNA SEQ ID NO:15 (FIG. 20A) and by SEQ ID NO:16 (FIG. 20B), as well as SEQ ID NO:17 (FIG. 21A), and the following ATCC Accession Numbers: CAB69409 (strain Texas GB), CAA00289 (strain Chambers), ABW34443 (strain JS-1/06/wd), ABW89770 (strain B1), CAA77272 (strain LaSota type), CAF32450 (strain LaSota), ABI16058 (strain PB9601), ABG35963 (strain Chicken/China/Guangxi5/2000), U371189 (strain clone 30), U371190 (strain vineland), U371191 (strain VGGA), and U371193 (strain B1 (SEDRL)).

[0063] The term “glycoprotein” as used herein, refers to any protein conjugated to a nonprotein group that comprises a carbohydrate.

[0064] The term “paramyxovirus” as used herein, refers to any virus of the Paramyxoviridae family of the Mononegavirales order; that are negative-sense single-stranded RNA viruses responsible for a number of human and animal diseases (i.e., for example, Newcastle disease). Paramyxoviruses include, but are not limited to, for example, Sendai virus, Newcastle disease virus, Mumps virus, Measles virus, Respiratory syncytial (RS) virus, rinderpest virus, distemper virus, simian parainfluenza virus (SV5), type I, II, and III human parainfluenza viruses, etc. Sendai viruses may be wild-type strains, mutant strains, laboratory-passaged strains, artificially constructed strains, or so on. Incomplete viruses such as the DI particle (J. Virol., 1994, 68, 8413-8417), synthesized oligonucleotides, and so on, may also be utilized as material for producing the vaccine of the present invention.

[0065] The term “Late Domain” as used herein, refers to any region in a viral protein that is involved in the budding of virus particles from a cell's plasma membrane. Late Domains comprise highly conserved motifs known to mediate protein-protein interactions between cellular proteins. For example, at least three classes of motifs comprise PTAP (SEQ ID NO:4), PPXY (SEQ ID NO:5), or YXXL (SEQ ID NO:3) (i.e., for example, a YANL sequence).

[0066] The term “vector” as used herein, refers to any nucleotide sequence comprising exogenous operative genes capable of expression within a cell. For example, a vector may comprise a nucleic acid encoding a viral matrix protein and at least two glycoproteins that are expressed within a human, avian, or insect cell culture system. For example, a baculovirus vector may be used to transfect various Lepidoptera species.

[0067] The term “transfect” or “transfecting” as used herein, refers to any mechanism by which a vector may be incorporated into a host cell. A successful transfection results in the capability of the host cell to express any operative genes carried by the vector. Transfections may be stable or transient. One example of a transient transfection comprises vector expression within a cell, wherein the vector is not integrated within the host cell genome. Alternatively, a stable transfection comprises vector expression within a cell, wherein the vector is integrated within the host cell genome.

[0068] The term “host” as used herein, refers to any organism capable of becoming infected by a virus and immunized by a virus-like particle. A host may be an avian host (i.e., for example, a chicken) or a mammalian host (i.e., for example, human, mouse, dog, rat, cow, sheep, etc.).

[0069] The term “sequence tag” as used herein, refers to any atom or molecule that can be used to provide a detectable (preferably quantifiable) signal, and that can be attached to a nucleic acid or protein. “Sequence tags” may provide signals detectable by fluorescence, radioactivity, colorimetry, gravimetry, X-ray diffraction or absorption, magnetism, enzymatic activity, and the like. A “sequence tag” may be a charged moiety (positive or negative charge) or alternatively, may be charge neutral. “Sequence tags” can include or consist of a nucleic acid or protein sequence, so long as the sequence comprising the “sequence tag” is detectable.

[0070] The term “adjuvant” as used herein, refers to any compound which enhances or stimulates the immune response when administered with an antigen(s). Exemplary adjuvants include binders such as carboxymethylcellulose, ethyl cellulose, microcrystalline cellulose, or gelatin; excipients such as starch, lactose or dextrins, disintegrating agents such as alginic acid, sodium alginate, Primogel, corn starch and the like; lubricants such as magnesium stearate or Sterotex; glidants such as colloidal silicon dioxide; sweetening agents such as sucrose or saccharin, a flavoring agent such as peppermint, methyl salicylate or orange flavoring, and a coloring agent.

[0071] “Glycosaminoglycan,” “GAG,” and “mucopolysaccharide” refer to long unbranched polysaccharides consisting of a repeating disaccharide unit.

[0072] “Heparin” is a member of the glycosaminoglycan family of carbohydrates (which includes the closely-related molecule heparan sulfate) and consists of a variably-sulfated repeating disaccharide unit. “Heparin” includes native and commercial polymers of disaccharide units. Native heparin has a molecular weight ranging from 3 kDa to 50 kDa, while the average molecular weight of most commercial heparin preparations is in the range of 12 kDa to 15 kDa. The disaccharide units in heparin are exemplified by GlcA-GlcNAc, GlcA-GlcNS, IdoA-GlcNS, IdoA(2S)GlcNS, IdoA-GlcNS(6S), and IdoA(2S)-GlcNS(6S). Rare disaccharides contain a 3-O-sulfated glucosamine (GlcNS(3S,6S)) or a free amine group (GlcNH3+). The most common disaccharide unit is composed of a 2-O-sulfated iduronic acid and 6-O-sulfated, N-sulfated glucosamine, IdoA(2S)-GlcNS(6S). For example, this makes up 85% of heparins from beef lung and about 75% of those from porcine intestinal mucosa. Under physiological conditions, the ester and amide sulfate groups are deprotonated and attract positively-charged counter ions to form a heparin salt. It is in this form that heparin is usually administered as an anticoagulant. Data herein was obtained using heparin that contained at least 10 repeating units.

[0073] A “chimeric” polypeptide refers to a polypeptide that contains at least two amino acid sequences that are covalently linked together. The two amino acid sequences may be derived from different sources (e.g., different organisms, different tissues, different cells, etc.) or may be different sequences from the same source. In one embodiment, the chimeric polypeptide is a fusion polypeptide wherein at least two different amino acid sequences are recombinantly expressed together.

### BRIEF DESCRIPTION OF THE FIGURES

[0074] The following figures are presented only as an illustration of specific embodiments of the present invention and are not intended to be limiting.

[0075] FIG. 1 presents exemplary data showing co-expression of NP, F, HN, and M proteins resulted in VLP formation and release. Radioactively labeled proteins in both the transfected (Panel A) and infected (Panel B) extracts were immunoprecipitated with a cocktail of antibodies specific for all viral proteins and precipitated labeled proteins are shown on the left side of each panel. VLP particles in cell supernatants were purified as described in Example 4. After flotation into sucrose gradients, each gradient fraction was immunoprecipitated with antibody cocktail (right side of each panel). The density of each fraction (g/cc) is shown at the bottom. Panel A: avian cells, co-transfected with pCAGGS(-NP), (-M), (F-K115Q), and (-HN), were radioactively labeled with ³⁵S-methionine and ³⁵S-cysteine for 4 hours (P) and then chased in non-radioactive medium for 8 hours (C). Panel B: avian cells, infected with NDV, strain AV, with a Multiplicity Of Infection (MOI) of 5 pfu for 5 hours, were pulse-labeled for 30 minutes and chased in non-radioactive medium for 8 hours. Panel C shows the quantitation of efficiency of virion and VLP release as determined by the amount of M protein in the pulse and chase cell extracts. The results of 3 separate experiments were averaged and the standard deviation is shown.

[0076] FIG. 2 presents exemplary data showing that M protein is sufficient for VLP release. Avian cells were transfected with pCAGGS-NP, -M, -F-K115Q, and -HN individually. Panel A shows radioactively labeled proteins in the extracts at time of pulse (left) and chase (right). Particles in the supernatants of avian cells expressing NP, M, F, and HN individually, were concentrated and floated into sucrose gradients as described above in FIG. 1. Panel B shows the distribution in the gradients of radioactively labeled proteins derived from each supernatant. Panel C shows the quantification of the amounts of each protein in VLPs. The results of three separate experiments were averaged and the standard deviation is shown.

[0077] FIG. 3 presents exemplary data showing effects of NP, F, or HN protein co-expression with M protein on VLP release. Avian cells, transfected with all possible combinations of two NDV structural protein genes (i.e., pair wise combinations including, but not limited to, F+NP, F+M, F+HN, HN+NP, HN+M and NP+M, wherein F is F-K115Q). Labeling in a pulse-chase protocol is as described in FIG. 1. Particles present in the supernatants were concentrated and then floated into sucrose gradients as described in Example 4. Panel A shows labeled proteins in cell extracts at time of pulse (top) and chase (bottom). Panel B shows the proteins present in each gradient fraction after immunoprecipitation of each fraction with an antibody cocktail. Densities (g/cc) of the fractions are shown at the bottom. Gradients from transfections that did not contain M protein are not shown since there were no radioactively labeled proteins in those gradients. Panel C shows the quantification of each protein in VLPs released from transfected avian cells. Results are the average of three experiments and the standard deviation is shown.

[0078] FIG. 4 presents exemplary data showing effects of expressing all combinations of three viral proteins on VLP release. Avian cells, transfected with all possible combinations of three NDV structural protein genes, were labeled in a pulse-chase protocol and particles in the supernatant were concentrated and floated into a sucrose gradient as in FIG. 1. The proteins in the cell extracts were immunoprecipitated with the antibody cocktail. Panel A show labeled proteins in cell extracts at time of pulse (top) and chase (bottom). Panel B shows the proteins present in each gradient fraction after immunoprecipitation of each fraction with an antibody cocktail for some of the viral protein combinations. Densities (g/cc) of the fractions are shown at the bottom. Panel C shows quantification of the amounts of each protein in VLPs. Panel D shows the efficiency of VLP release based on the percent of pulse labeled M protein remaining in the chase extracts. Panel E show the relative amounts of M protein in the pulse extracts.

[0079] FIG. 5 presents exemplary data showing that dominant-negative mutants of CHMP3 and Vps4-E228Q, blocked release of M protein-containing particles. Panel A, left, shows pulse labeled extracts of human 293T cells that were simultaneously transfected with pCAGGS-M (1.0 μg) and either pDsRed2-N1 vector (0.1, 0.5 and 1.0 μg) or pDsRed2-N1-CHMP3-RFP (0.1, 0.5 and 1.0 μg). Panel A, right, shows the VLPs released from these cells after an 8 hour chase. Panel B, left, shows extracts of pulse labeled cells that were simultaneously transfected with pCAGGS-M and either pBJ5 vector or pBJ5-Vps4A-E228Q-Flag. Panel B, right, shows the VLPs released from these cells after an 8 hour chase. Transfected 293T cells in both A and B were labeled in a pulse-chase protocol as described in FIG. 1. Particles from supernatants were concentrated by centrifugation onto a sucrose pad as described in Example 4. Panels C and D show percent VLPs released from cells transfected with pCAGGS-M and pDsRed2-N1-CHMP3 or pBJ5-Vps4A-E228Q relative to those released from cells transfected with pCAGGS-M and vector only. Panels E and F show the quantitation of protein expression (pulse label) in the cell extracts. Identical results were obtained in two separate experiments.

[0080] FIG. 6 presents a schematic of one embodiment of the viral protein structure of a representative Paramyxovirus.

[0081] FIG. 7 presents a schematic of one embodiment of an infectious cycle caused by a representative Paramyxovirus.

[0082] FIG. 8 presents an amino acid sequence (SEQ ID NO:6) (Panel A) and a nucleotide sequence (SEQ ID NO:7) (Panel B) encoding a first Newcastle disease virus nucleocapsid protein (AB124608).

[0083] FIG. 9 presents an amino acid sequence (SEQ ID NO:8) (Panel A) and a nucleotide sequence (SEQ ID NO:9) (Panel B) encoding a first Newcastle disease virus hemagglutinin-neuraminidase protein (AY288990).

[0084] FIG. 10 presents a partial amino acid sequence (SEQ ID NO:10) (Panel A) and a partial nucleotide sequence (SEQ ID NO:11) (Panel B) encoding a first Newcastle disease virus fusion protein (Y18728).

[0085] FIG. 11 presents an amino acid sequence (SEQ ID NO:12) (Panel A) and a nucleotide sequence (SEQ ID NO:13) (Panel B) encoding a first Newcastle disease virus matrix protein (AY728363).

[0086] FIGS. 12A/B present of a nucleotide sequence (SEQ ID NO:14) for a baculovirus expression vector (DQ003705).

[0087] FIG. 13 presents two exemplary plasmids comprising a pCAGGS expression vector. Panel A: pCAGGS/MCS; Panel B: pJW4303 (U.S. Pat. No. 5,916,879, herein incorporated by reference). It should be noted that the pCAGGS expression vector comprises a hybrid cytomegalovirus (CMV) beta actin promoter sequence.

[0088] FIG. 14 presents exemplary autoradiograph data showing viral protein accumulation resulting from a pulse-chase experiment that compares virus release from avian and COS-7 cells. Panel A: F protein. Panel B: NP protein.

[0089] FIG. 15 presents exemplary data showing the quantification pulse-chase autoradiography shown in FIG. 14. Panel A: F protein. Panel B: NP protein. Diamonds: Avian cells. Squares: COS-7 cells.

[0090] FIG. 16 presents exemplary autoradiograph data from purification of VLPs in sucrose gradients released from avian cells (Panel A) and from COS-7 cells (Panel B). Lanes 1-9 provide banding patterns in sucrose densities of 1.12-1.26, respectively. HN=heamagglutinin-neuraminidase protein. F₀=fusion protein; NP=nucleocapsid protein; M=matrix protein.

[0091] FIG. 17 presents an exemplary autoradiograph showing residual viral proteins in cell extract lysates following a pulse-chase experiment. Panel A: Avian cells. Panel B; COS-7 cells.

[0092] FIG. 18 presents exemplary data demonstrating the improved efficiency of M protein VLP release from avian (Panel A) versus COS-7 primate cells (Panel B) when transfected only by an M protein cDNA. Radioactively labeled M protein (M arrow) is shown in each sucrose gradient density fraction (i.e., Lanes 1-9; 1.12-1.26) is shown.

[0093] FIG. 19 presents exemplary densitometry data comparing a quantification of VLP particle release from avian (Panel A) and COS-7 primate cells (Panel B) after transfection by either NP, M, F-K115Q, and HN protein cDNAs individually, or transfected using a combination of NP, M, F-K115Q, and HN protein cDNAs, in combination (ALL).

[0094] FIG. 20 presents an amino acid sequence (SEQ ID NO:15) (Panel A) and a nucleotide sequence (SEQ ID NO:16) (Panel B) encoding a second Newcastle disease virus hemagglutinin-neuraminidase mRNA (M22110).

[0095] FIG. 21 presents an amino acid sequence (SEQ ID NO:17) (Panel A) and a nucleotide sequence (SEQ ID NO:18) (Panel B) encoding a third Newcastle disease virus hemagglutinin-neuraminidase protein (U37193).

[0096] FIG. 22 presents an amino acid sequence (SEQ ID NO:19) (Panel A) and a nucleotide sequence (SEQ ID NO:20) (Panel B) encoding a second Newcastle disease virus fusion protein (M21881).

[0097] FIG. 23 presents an amino acid sequence (SEQ ID NO:21) for a third Newcastle disease virus B1 fusion protein (AAG36978).

[0098] FIG. 24 presents an amino acid sequence (SEQ ID NO:22) (Panel A) and a nucleotide sequence (SEQ ID NO:23) (Panel B) encoding a second Newcastle disease virus nucleocapsid protein. (AF060483).

[0099] FIG. 25 presents an amino acid sequence (SEQ ID NO:24) (Panel A) and a nucleotide sequence (SEQ ID NO:25) (Panel B) encoding a second Newcastle disease virus matrix protein (M16622).

[0100] FIG. 26 presents one embodiment of an amino acid sequence (SEQ ID NO:26) (Panel A) and a nucleotide sequence (SEQ ID NO:27) (Panel B) encoding a third Newcastle disease virus matrix protein (U25828).

[0101] FIGS. 27A-27D present a nucleotide sequence (SEQ ID NO:28) of a Newcastle disease virus B1 complete genome (AF309418).

[0102] FIG. 28 illustrates one method of constructing baculovirus recombinant DNA.

[0103] FIG. 29 illustrates one ligation-independent cloning technique to produce a baculovirus recombinant DNA containing His-tag and S-tag sequence tags.

[0104] FIG. 30 depicts a circular map of a wild-type AcNPV C6 genome containing 154 putative open reading frames. Genes marked with solid arrows are known and reported in protein sequence databases. hr=AcNPV repetitive homologous region positions.

[0105] FIG. 31 illustrates seven (7) embodiments of a baculovirus transfer plasmid (pBAC).

[0106] FIG. 32 presents one embodiment of an amino acid sequence (SEQ ID NO:29) (Panel A) and a nucleotide sequence (SEQ ID NO:30) (Panel B) encoding a first measles virus hemagglutinin protein (AY249267).

[0107] FIG. 33 presents one embodiment of an amino acid sequence (SEQ ID NO:31) (Panel A) and a nucleotide sequence (SEQ ID NO:32) (Panel B) encoding a second measles virus hemagglutinin protein (AY249269).

[0108] FIG. 34 presents one embodiment of an amino acid sequence (SEQ ID NO:33) (Panel A) and a nucleotide sequence (SEQ ID NO:34) (Panel B) encoding a third measles virus hemagglutinin protein (DQ011611).

[0109] FIG. 35 presents one embodiment of an amino acid sequence (SEQ ID NO:35) (Panel A) and a nucleotide sequence (SEQ ID NO:36) (Panel B) encoding a first measles virus fusion protein (AJ133108).

[0110] FIG. 36 presents one embodiment of an amino acid sequence (SEQ ID NO:37) (Panel A) and a nucleotide sequence (SEQ ID NO:38) (Panel B) encoding a second measles virus fusion protein (X05597).

[0111] FIG. 37 presents one embodiment of an amino acid sequence (SEQ ID NO:39) (Panel A) and a nucleotide sequence (SEQ ID NO:40) (Panel B) encoding a third measles virus fusion protein (Y17840).

[0112] FIG. 38 presents one embodiment of an amino acid sequence (SEQ ID NO:41) (Panel A) and a nucleotide sequence (SEQ ID NO:42) (Panel B) encoding a first measles virus nucleocapsid protein (M89921).

[0113] FIG. 39 presents one embodiment of an amino acid sequence (SEQ ID NO:43) (Panel A) and a nucleotide sequence (SEQ ID NO:44) (Panel B) encoding a second measles virus nucleocapsid protein (AF171232).

[0114] FIG. 40 presents one embodiment of an amino acid sequence (SEQ ID NO:45) (Panel A) and a nucleotide sequence (SEQ ID NO:46) (Panel B) encoding a third measles virus nucleocapsid protein (X01999).

[0115] FIG. 41 presents one embodiment of an amino acid sequence (SEQ ID NO:47) (Panel A) and a nucleotide sequence (SEQ ID NO:48) (Panel B) encoding a first measles virus matrix protein (D12682).

[0116] FIG. 42 presents one embodiment of an amino acid sequence (SEQ ID NO:49) (Panel A) and a nucleotide sequence (SEQ ID NO:50) (Panel B) encoding a second measles virus matrix protein (D12683).

[0117] FIG. 43 presents one embodiment of an amino acid sequence (SEQ ID NO:51) (Panel A) and a nucleotide sequence (SEQ ID NO:52) (Panel B) encoding a third measles virus matrix protein (AY124779).

[0118] FIG. 44 presents one embodiment of an amino acid sequence (SEQ ID NO:53) (Panel A) and a nucleotide sequence (SEQ ID NO:54) (Panel B) encoding a first respiratory syncytial virus G protein (i.e., for example, a glycoprotein G protein) (U92104).

[0119] FIG. 45 presents one embodiment of an amino acid sequence (SEQ ID NO:55) (Panel A) and a nucleotide sequence (SEQ ID NO:56) (Panel B) encoding a second respiratory syncytial virus G protein (AY333361).

[0120] FIG. 46 presents one embodiment of an amino acid sequence (SEQ ID NO:57) (Panel A) and a nucleotide sequence (SEQ ID NO:58) (Panel B) encoding a third respiratory syncytial virus G protein (AB117522).

[0121] FIG. 47 presents one embodiment of an amino acid sequence (SEQ ID NO:59) (Panel A) and a nucleotide sequence (SEQ ID NO:60) (Panel B) encoding a first respiratory syncytial virus fusion protein (AY198177).

[0122] FIG. 48 presents one embodiment of an amino acid sequence (SEQ ID NO:61) (Panel A) and a nucleotide sequence (SEQ ID NO:62) (Panel B) encoding a second respiratory syncytial virus fusion protein (Z26524).

[0123] FIG. 49 presents one embodiment of an amino acid sequence (SEQ ID NO:63) (Panel A) and a nucleotide sequence (SEQ ID NO:64) (Panel B) encoding a third respiratory syncytial virus fusion protein (D00850).

[0124] FIG. 50 presents one embodiment of an amino acid sequence (SEQ ID NO:65) (Panel A) and a nucleotide sequence (SEQ ID NO:66) (Panel B) encoding a first respiratory syncytial virus matrix protein (U02470).

[0125] FIG. 51 presents one embodiment of an amino acid sequence (SEQ ID NO:67) (Panel A) and a nucleotide sequence (SEQ ID NO:68) (Panel B) encoding a second respiratory syncytial virus matrix protein (AY198177).

[0126] FIG. 52 presents one embodiment of an amino acid sequence (SEQ ID NO:69) (Panel A) and a nucleotide sequence (SEQ ID NO:70) (Panel B) encoding a first respiratory syncytial virus nucleocapsid protein (U07233).

[0127] FIG. 53 presents one embodiment of an amino acid sequence (SEQ ID NO:71) (Panel A) and a nucleotide sequence (SEQ ID NO:72) (Panel B) encoding a second respiratory syncytial virus nucleocapsid protein (X00001).

[0128] FIG. 54 presents one embodiment of an amino acid sequence (SEQ ID NO:73) (Panel A) and a nucleotide sequence (SEQ ID NO:74) (Panel B) encoding a third respiratory syncytial virus nucleocapsid protein (S40504).

[0129] FIG. 55 presents one embodiment of an amino acid sequence (SEQ ID NO:75) (Panel A) and a nucleotide sequence (SEQ ID NO:76) (Panel B) encoding a first parainfluenza virus 3 nucleocapsid protein (D10025).

[0130] FIG. 56 presents one embodiment of an amino acid sequence (SEQ ID NO:77) (Panel A) and a nucleotide sequence (SEQ ID NO:78) (Panel B) encoding a first parainfluenza virus 3 fusion protein (D00016).

[0131] FIG. 57 presents one embodiment of an amino acid sequence (SEQ ID NO:79) (Panel A) and a nucleotide sequence (SEQ ID NO:80) (Panel B) encoding a second parainfluenza virus 3 fusion protein (AF394241).

[0132] FIG. 58 presents one embodiment of an amino acid sequence (SEQ ID NO:81) (Panel A) and a nucleotide sequence (SEQ ID NO:82) (Panel B) encoding a first parainfluenza virus 3 matrix protein (D00130).

[0133] FIG. 59 presents one embodiment of an amino acid sequence (SEQ ID NO:83) (Panel A) and a nucleotide sequence (SEQ ID NO:84) (Panel B) encoding a first parainfluenza virus 3 hemagglutinin-neuraminidase protein (AB189960).

[0134] FIG. 60 presents one embodiment of an amino acid sequence (SEQ ID NO:85) (Panel A) and a nucleotide sequence (SEQ ID NO:86) (Panel B) encoding a second parainfluenza virus 3 hemagglutinin-neuraminidase protein (AB189961).

[0135] FIG. 61 presents one embodiment of an amino acid sequence (SEQ ID NO:87) (Panel A) and a nucleotide sequence (SEQ ID NO:88) (Panel B) encoding a third parainfluenza virus 3 hemagglutinin-neuraminidase protein (L25350).

[0136] FIG. 62 presents exemplary data showing that M proteins may be encased in membranous particles. Avian cells were transfected with pCAGGS-M and radioactively labeled VLPs were isolated and purified. Extract (upper panel) and VLPs (middle panel) were treated with different concentrations (0.25, 0.5, 1, 5, 10, and 20 μg/ml; lanes 2 to 7 respectively) of Proteinase K for 30 minutes on ice. In parallel, VLPs were incubated in 1% Triton X-100 prior to Proteinase K treatment (bottom panel). After incubation with protease, reactions were stopped by adding 0.1 mM PMSF. M proteins were then immunoprecipitated.

[0137] FIG. 63 presents exemplary data showing that M protein is required for VLP release. Avian cells were transfected with all possible combinations of cDNAs in pCAGGS vector encoding NP, F, and HN proteins in the absence of M cDNA (F-K115Q+HN, F-K115Q+NP, HN+NP, NP+F-K115Q+HN). Particles in cell supernatants were then purified. Panels show proteins present in each gradient fraction. Radioactively labeled infected cell extract was used as marker. Densities of fractions are shown at the bottom (g/cc).

[0138] FIG. 64 presents exemplary data showing co-localization of M protein with F and HN proteins. The cell surface localization of NDV F and HN proteins and the cellular localization of M proteins were analyzed by immunofluorescence microscopy. Avian cells were either transfected individually (A) or with F-K115Q+M or HN+M (B), with NP+M+F-K115Q, NP+M+HN or M+F-K115Q+HN(C) and all 4 cDNAs (D). Nuclei were stained with DAPI (blue) 40 h post-transfection. Intact transfected cells were stained with rabbit anti-F protein antibodies or anti-HN protein antibodies as indicated in the panels. Cells were permeabilized with 0.05% Triton X-100 prior to incubation with anti-M protein antibody. Secondary antibodies were anti-rabbit Alexa 488 conjugate (green) and anti-mouse Alexa 568 conjugate (red). Images were merged using Adobe Photoshop.

[0139] FIG. 65 presents exemplary data showing co-immunoprecipitation of viral proteins in VLPs. Radioactively labeled VLPs generated from cells expressing NP+M+F-K115Q+HN (A), M+F-K115Q+HN (B), NP+M+F-K115Q (C) and NP+M+HN (D) were lysed in TNE buffer with 1% Triton X-100. Lysed VLPs were then incubated with excess amounts of cocktail of anti-F protein antibodies (anti-HR1, anti-HR2, anti-Ftail, anti-F2-96 and monoclonal anti-F (G5)), anti-HN protein antibodies (mix of monoclonal antibodies), anti-M protein monoclonal antibody or cocktail of NDV-specific antibodies for overnight at 4° C. No antibody as well as pre-immune sera were used as negative controls. Immune complexes were precipitated with prewashed Pansorbin A for at least 2 h at 4° C. with constant mixing. Samples were washed three times in cold TNE with 0.5% Triton X-100. All steps of co-immunoprecipitation were accomplished at 4° C. Proteins were resolved by SDS-PAGE gel electrophoresis. Results show one of three independent experiments, all with identical results.

[0140] FIG. 66 presents exemplary data showing protein-protein interactions in VLPs. Inset: Various embodiments of viral protein-protein interactions detected by co-immunoprecipitation of proteins in VLPs. Also shown are illustrative potential interactions that may result in assembly of VLPs formed by co-expression of all combinations of NP, F, and HN proteins with M protein.

[0141] FIG. 67 presents exemplary data showing VLPs released from 293T cells. 293T cells transfected with pCAGGS M (Panel A) or with mixture of pCAGGS-NP, -M, -F-K155Q, and -HN (Panel B), were radioactively labeled with [³⁵S] methionine and [³⁵S] cysteine for 4 hours (P) and then chased in non-radioactive medium for 8 hours (C). Proteins present in cell lysates were immunoprecipitated with a cocktail of antibodies specific for all viral proteins and the precipitated labeled proteins are shown on the left side of each panel. Particles in cell supernatants were then purified. After flotation into sucrose gradients (right side of each panel), each gradient fraction was immunoprecipitated with the antibody cocktail. The density of each fraction (g/cc) is shown at the bottom.

[0142] FIG. 68 presents exemplary data showing the effect of wild type and dominant-negative mutant protein of the VPS pathway M protein VLP release. Panel A shows cell extracts of 293T cells (top) and corresponding released particles (bottom) from cells co-transfected with pCAGGS-M and either pDsRed2-N1 vector (lane 1), pBJ5-WT-CHMP3 (lane 2) or pDsRed2-N1-CHMP3-RFP (lane 3). Panel C shows cell extracts of 293T cells (top) and corresponding released particles (bottom) from cells co-transfected with pCAGGS-M and either pBJ5 vector (lane 1), pBJ5-WT-Vps4A (lane 2) or pBJ5-Vps4A-E228Q (lane 3). Panel E shows extracts of 293T cells (top) and corresponding VLPs (bottom) from cells co-transfected with pCAGGS-M and either pDsRed2-N1 vector (lane 1), pBJ5-AIP 1-HA (lane 2) or pDsRed2-N1-AIP1-HA-CHMP3-RFP (lane 3). Extracts are from pulse labeled cells. VLPs are released from pulse labeled cells during an 8-hour nonradioactive chase. Particles were then purified. Proteins were immunoprecipitated using NDV protein-specific antibodies and resolved by SDS-PAGE. Panels B, D and F show quantification of particles released relative to those released from wild type VPS protein controls. Identical results were obtained in two separate experiments.

[0143] FIG. 69 presents exemplary data showing the effect of dominant negative mutants of CHMP3, Vps4A and AIP1 on the release of complete VLPs. Panel A shows extracts of 293T cells (lanes 1-3) and corresponding released VLPs (lanes 4-6) from cells co-transfected with NDV cDNAs, encoding NP, M, HN, and F proteins, and either pDsRed2-N1 vector (lanes 1 and 4), pBJ5-WT-CHMP3 (lanes 2 and 5) or pDsRed2-N1-CHMP3-RFP (lanes 3 and 6). Panel C shows extracts of 293T cells (lanes 1-3) and corresponding released VLPS (lanes 4-6) from cells co-transfected with the mixture of four NDV cDNAs and either pBJ5 vector (lanes 1 and 4), pBJ5-WT-Vps4A (lanes 2 and 5) or pBJ5-Vps4A-E228Q (lanes 3 and 6). Panel E shows extracts of 293T cells (lanes 1-3) and corresponding VLPs (lanes 4-6) from cells co-transfected with the mixture of NDV cDNAs and either pDsRed2-N1 vector (lanes 1 and 4), pBJ5-AIP1-HA (lanes 2 and 5) or pDsRed2-N1-AIP1-HA-RFP (lanes 3 and 6). Extracts are from pulse labeled cells. VLPs are released from pulse labeled cells during an 8-hour nonradioactive chase. Particles were then purified. Proteins were immunoprecipitated using NDV protein-specific antibodies and resolved by SDS-PAGE. Panels B, D, and F show quantification of VLPs released relative to vector and to wild type Vps protein controls. Identical results were obtained in two separate experiments.

[0144] FIG. 70 presents exemplary data demonstrating the functionality of the L domain in NDV M protein. Panel A shows wild type M protein, mutant M proteins with alanine substitutions at amino acid positions 216 and 219 (M-A₂₁₆A₂₁₉) or 232 and 235 (M-A₂₃₂A₂₃₅), and YPDL or PTAP substitutions at positions 232-235. Panel B shows extract (top) and VLPs released (bottom) from 293T cells expressing wild type or mutant M proteins. Panel D shows extract (left) and VLPs released (right) from 293T cells expressing NP, F and HN proteins with either wild type or mutant M proteins. Particles were then purified. Proteins were immunoprecipitated using NDV protein-specific antibodies and resolved by SDS-PAGE. Panels C and E shows quantification of VLPs released relative to wild type M protein. Identical results were obtained in two separate experiments.

[0145] FIG. 71 presents exemplary data showing the incorporation of AIP1 in VLPs. 293T cells were transfected with pCAGGS M and either empty vector, or vector with HA-tagged AIP1. Panel A shows radioactively labeled M protein precipitated from cell extracts (anti-M IP) and VLPs using M protein-specific monoclonal antibody. HA-AIP1 (N-terminally tagged) and AIP1-HA (C-terminally tagged) were detected in extracts and VLPs by immunoblotting using HA antibody conjugated with peroxidase (anti-HA-IB). Panel B shows precipitated radiolabeled M protein and AIP1-HA from cell extracts (top) and VLPs (bottom).

[0146] FIG. 72 presents exemplary data comparing the protein content of purified NDV virus and VLPs without prior immunoprecipitation.

[0147] FIG. 73 presents exemplary electron micrographs showing virus (B1) (upper panel), M protein-only VLPs (middle panel) and NP, M, F, and HN VLPs (lower panel).

[0148] FIG. 74 presents exemplary data showing a silver stain of virus (B1) when grown in eggs as compared to VLPs prepared from a large scale tissue culture.

[0149] FIG. 75 shows the amino acid sequence (SEQ ID NO: 186) for Canine Distemper Virus Fusion protein.

[0150] FIG. 76 shows the amino acid sequence (SEQ ID NO: 187) for Cytomegalovirus (CMV) gG glycoprotein.

[0151] FIG. 77 shows the amino acid sequence (SEQ ID NO: 188) for Cytomegalovirus gH Glycoprotein.

[0152] FIG. 78 shows the nucleotide sequence (SEQ ID NO: 209) encoding Cytomegalovirus gH Glycoprotein.

[0153] FIG. 79 shows the nucleotide sequence (SEQ ID NO: 189) for Ebola virus Glycoprotein precursor.

[0154] FIG. 80 shows the nucleotide sequence (SEQ ID NO: 210) encoding Ebola virus Glycoprotein precursor.

[0155] FIG. 81 shows the amino acid sequence (SEQ ID NO: 190) for Human Immunodeficiency Virus (HIV) envelope protein.

[0156] FIG. 82 shows the nucleotide sequence (SEQ ID NO: 211) encoding Human Immunodeficiency Virus (HIV) envelope protein.

[0157] FIG. 83 shows the amino acid sequence (SEQ ID NO: 191) for Herpes Simplex virus (HSV) gH glycoprotein.

[0158] FIG. 84 shows the nucleotide sequence (SEQ ID NO: 212) encoding Herpes Simplex virus (HSV) gH glycoprotein.

[0159] FIG. 85 shows the amino acid sequence (SEQ ID NO: 192) for Herpes Simplex virus (HSV) gL Glycoprotein.

[0160] FIG. 86 shows the nucleotide sequence (SEQ ID NO: 213) encoding Herpes Simplex virus (HSV) gL Glycoprotein.

[0161] FIG. 87 shows the amino acid sequence (SEQ ID NO: 193) for Influenza virus HA-type H1 protein.

[0162] FIG. 88 shows the nucleotide sequence (SEQ ID NO: 214) encoding Influenza virus B HA protein.

[0163] FIG. 89 shows the amino acid sequence (SEQ ID NO: 194) for Influenza virus HA from influenza virus B HA Malaysia protein.

[0164] FIG. 90 shows the nucleotide sequence (SEQ ID NO: 215) encoding Influenza virus HA from influenza B Malaysia protein.

[0165] FIG. 91 shows the amino acid sequence (SEQ ID NO: 195) for Influenza virus HA second representative H1 protein.

[0166] FIG. 92 shows the nucleotide sequence (SEQ ID NO: 216) encoding Influenza virus HA second representative H1 protein.

[0167] FIG. 93 shows the amino acid sequence (SEQ ID NO: 196) for Influenza virus HA representative H3 protein.

[0168] FIG. 94 shows the nucleotide sequence (SEQ ID NO: 217) encoding Influenza virus HA representative H3 protein.

[0169] FIG. 95 shows the amino acid sequence (SEQ ID NO: 197) for Influenza virus HA representative H5 HA protein.

[0170] FIG. 96 shows the nucleotide sequence (SEQ ID NO: 218) encoding Influenza virus HA representative H5 HA protein.

[0171] FIG. 97 shows the amino acid sequence (SEQ ID NO: 198) for Influenza virus HA representative H7 HA protein.

[0172] FIG. 98 shows the nucleotide sequence (SEQ ID NO: 219) encoding Influenza virus HA representative H7 HA protein.

[0173] FIG. 99 shows the amino acid sequence (SEQ ID NO: 199) for Influenza virus HA representative H9 HA protein.

[0174] FIG. 100 shows the nucleotide sequence (SEQ ID NO: 220) encoding Influenza virus HA representative H9 HA protein.

[0175] FIG. 101 shows the amino acid sequence (SEQ ID NO: 200) for Nipah virus F protein.

[0176] FIG. 102 shows the nucleotide sequence (SEQ ID NO: 221) encoding Nipah virus F protein.

[0177] FIG. 103 shows the amino acid sequence (SEQ ID NO: 201) for Respiratory Syncytial Virus (RSV) F protein (first example).

[0178] FIG. 104 shows the nucleotide sequence (SEQ ID NO: 222) encoding Respiratory Syncytial Virus (RSV) F protein (first example).

[0179] FIG. 105 shows the amino acid sequence (SEQ ID NO: 202) for Respiratory Syncytial Virus F protein (second example).

[0180] FIG. 106 shows the amino acid sequence (SEQ ID NO: 203) for SARS virus surface spike glycoprotein.

[0181] FIG. 107 shows the nucleotide sequence (SEQ ID NO: 223) encoding SARS virus surface spike glycoprotein.

[0182] FIG. 108 shows the amino acid sequence (SEQ ID NO: 205) for Varicella Zoster Virus gB glycoprotein.

[0183] FIG. 109 shows the nucleotide sequence (SEQ ID NO: 224) encoding Varicella Zoster Virus gB glycoprotein.

[0184] FIG. 110 shows the amino acid sequence (SEQ ID NO: 206) for Varicella Zoster Virus gE glycoprotein.

[0185] FIG. 111 shows the nucleotide sequence (SEQ ID NO: 225) encoding Varicella Zoster Virus gE glycoprotein.

[0186] FIG. 112 shows the amino acid sequence (SEQ ID NO: 207) for Varicella Zoster Virus gI glycoprotein.

[0187] FIG. 113 shows the nucleotide sequence (SEQ ID NO: 226) encoding Varicella Zoster Virus gI glycoprotein.

[0188] FIG. 114 shows the amino acid sequence (SEQ ID NO: 115) for Canine Distemper Virus H Glycoprotein.

[0189] FIG. 115 shows the amino acid sequence (SEQ ID NO: 116) for Avian Metapneumovirus G protein.

[0190] FIG. 116 shows the nucleotide sequence (SEQ ID NO: 133) encoding Avian Metapneumovirus G protein.

[0191] FIG. 117 shows the amino acid sequence (SEQ ID NO: 117) for Human Metapneumovirus G Glycoprotein.

[0192] FIG. 118 shows the nucleotide sequence (SEQ ID NO: 134) encoding Human Metapneumovirus G Glycoprotein.

[0193] FIG. 119 shows the amino acid sequence (SEQ ID NO: 118) for Human Respiratory Syncytial Virus G Glycoprotein.

[0194] FIG. 120 shows the amino acid sequence (SEQ ID NO: 119) for Influenza Virus B NA Glycoprotein.

[0195] FIG. 121 shows the amino acid sequence (SEQ ID NO: 120) for Influenza Virus N1 NA from H5N1 Virus protein.

[0196] FIG. 122 shows the nucleotide sequence (SEQ ID NO: 135) encoding Influenza Virus N1 NA from H5N1 Virus protein.

[0197] FIG. 123 shows the amino acid sequence (SEQ ID NO: 121) for Influenza Virus NA N2 protein (first example).

[0198] FIG. 124 shows the amino acid sequence (SEQ ID NO: 122) for Influenza Virus NA N2 type protein (second example).

[0199] FIG. 125 shows the nucleotide sequence (SEQ ID NO: 136) encoding Influenza Virus NA N2 type protein (second example).

[0200] FIG. 126 shows the amino acid sequence (SEQ ID NO: 123) for Influenza Virus NA N3 type protein.

[0201] FIG. 127 shows the nucleotide sequence (SEQ ID NO: 137) encoding Influenza Virus NA N3 type protein.

[0202] FIG. 128 shows the amino acid sequence (SEQ ID NO: 124) for Measles Virus HA protein.

[0203] FIG. 129 shows the nucleotide sequence (SEQ ID NO: 138) encoding Measles Virus HA protein.

[0204] FIG. 130 shows the amino acid sequence (SEQ ID NO: 125) for Mumps Virus HN protein.

[0205] FIG. 131 shows the nucleotide sequence (SEQ ID NO: 139) encoding Mumps Virus HN protein.

[0206] FIG. 132 shows the amino acid sequence (SEQ ID NO: 126) for Nipah Virus G protein.

[0207] FIG. 133 shows the nucleotide sequence (SEQ ID NO: 140) encoding Nipah Virus G protein.

[0208] FIG. 134 shows the amino acid sequence (SEQ ID NO: 127) for Parainfluenza Virus Type 2 HN protein.

[0209] FIG. 135 shows the nucleotide sequence (SEQ ID NO: 141) encoding Parainfluenza Virus Type 2 HN protein.

[0210] FIG. 136 shows the amino acid sequence (SEQ ID NO: 128) for Parainfluenza Virus 3 HN Glycoprotein (first example)

[0211] FIG. 137 shows the amino acid sequence (SEQ ID NO: 129) for Parainfluenza 3 Virus HN protein (second example).

[0212] FIG. 138 shows the nucleotide sequence (SEQ ID NO: 142) encoding Parainfluenza 3 Virus HN protein (second example).

[0213] FIG. 139 shows the amino acid sequence (SEQ ID NO: 130) for Respiratory Syncytial Virus G protein.

[0214] FIG. 140 shows the nucleotide sequence (SEQ ID NO: 143) encoding Respiratory Syncytial Virus G protein.

[0215] FIG. 141 shows the amino acid sequence (SEQ ID NO: 131) for Vaccinia Virus Surface Antigen.

[0216] FIG. 142 shows the nucleotide sequence (SEQ ID NO: 144) encoding Vaccinia Virus Surface Antigen.

[0217] FIG. 143 shows the amino acid sequence (SEQ ID NO: 145) for Epstein Barr Virus (EBV) LMP2A protein.

[0218] FIG. 144 shows the nucleotide sequence (SEQ ID NO: 144) encoding eight exons (SEQ ID Nos: 150-157) encoding Epstein Barr Virus (EBV) LMP2A protein.

[0219] FIG. 145 shows the amino acid sequence (SEQ ID NO: 146) for Glut 1 HTLV receptor protein.

[0220] FIG. 146 shows the nucleotide sequence (SEQ ID NO: 158) encoding Glut 1 HTLV receptor protein.

[0221] FIG. 147 shows the amino acid sequence (SEQ ID NO: 147) for Glutamate Receptor protein.

[0222] FIG. 148 shows the nucleotide sequence (SEQ ID NO: 159) encoding Glutamate Receptor protein.

[0223] FIG. 149 shows the amino acid sequence (SEQ ID NO: 148) for Hepatitis B virus L form of S glycoprotein.

[0224] FIG. 150 shows the nucleotide sequence (SEQ ID NO: 160) encoding Hepatitis B virus L form of S glycoprotein.

[0225] FIG. 151 shows the amino acid sequence (SEQ ID NO: 149) for Prion protein.

[0226] FIG. 152 shows the nucleotide sequence (SEQ ID NO: 161) encoding Prion protein.

[0227] FIG. 153 shows the amino acid sequence (SEQ ID NO: 162) for Hepatitis A Virus VP1 protein.

[0228] FIG. 154 shows the nucleotide sequence (SEQ ID NO: 167) encoding Hepatitis A Virus VP1 protein.

[0229] FIG. 155 shows the amino acid sequence (SEQ ID NO: 163) for Human Parvovirus VP (B 19 Virus) protein.

[0230] FIG. 156 shows the nucleotide sequence (SEQ ID NO: 168) encoding Human Parvovirus VP (B19 Virus) protein.

[0231] FIG. 157 shows the amino acid sequence (SEQ ID NO: 164) for Norovirus VP1 protein.

[0232] FIG. 158 shows the nucleotide sequence (SEQ ID NO: 169) encoding Norovirus VP1 protein.

[0233] FIG. 159 shows the amino acid sequence (SEQ ID NO: 165) for Human Rhinovirus VP1 protein.

[0234] FIG. 160 shows the nucleotide sequence (SEQ ID NO: 170) encoding Human Rhinovirus VP1 protein.

[0235] FIG. 161 shows the amino acid sequence (SEQ ID NO: 166) for Human Rotavirus (strain K8) VP4 protein.

[0236] FIG. 162 shows the nucleotide sequence (SEQ ID NO: 171) encoding Human Rotavirus (strain K8) VP4 protein.

[0237] FIG. 163 shows generation of Influenza and ND VLPs. Avian cells were co-transfected with cDNAs encoding the influenza M1, HA, and NA proteins (influenza). In a separate plate, avian cells were co-transfected with cDNAs encoding the NDV M, NP, HN, and F proteins (NDV). Another plate received only empty vector DNA (vector). At 40 hours after transfection, cells were radioactively labeled and at 48 hours particles released into the cell supernatants were purified and concentrated by centrifugation through a 20% sucrose pad. The pelleted particles were resolved on a polyacrylamide gel and proteins in the particles detected by autoradiography.

[0238] FIG. 164 shows construction of chimera protein genes. Top shows a diagram of the NDV F and the Influenza HA and the domains of each used for the constructions. Bottom shows the sequences at the junction of the HA ectodomain and the F protein TM domain.

[0239] FIG. 165 shows expression of chimera HA/F proteins. Avian cells were transfected with cDNAs encoding the proteins indicated at the top of each panel. Left panel, radioactively labeled proteins were immunoprecipitated (IP) with antibody specific for influenza virus. Middle panel: Surfaces of cells were biotinylated to label surface expressed proteins as previously described (McGinnes et al. (2006) J. Virol. 80:2894-2903). Biotinylated proteins are shown. Right panel: proteins were immunoprecipitated with antibody specific for the CT domain of the NDV F protein.

[0240] FIG. 166 shows incorporation of HA/F into ND VLPs. Avian cells were transfected with cDNAs indicated for each lane. At 40 hours after transfection, cells were radioactively labeled and at 48 hours particles in the cell supernatants were purified by centrifugation through a 20% sucrose pad. The proteins in the particles were resolved on polyacrylamide gels and detected by autoradiography.

[0241] FIG. 167 shows incorporation of HA/F into ND VLPs. Avian cells were transfected with cDNAs indicated for each lane. At 40 hours after transfection cells were radioactively labeled and at 48 hours particles in the cell supernatants were purified by centrifugation through a 30% sucrose pad. The proteins in the particles were resolved on polyacrylamide gels and detected by autoradiography.

[0242] FIG. 168 shows construction of chimera protein genes. Top shows a diagram of the NDV HN and the Influenza NA and the domains of each used for the constructions. Bottom shows the sequences at the junction of the NA ectodomain and the HN TM domain.

[0243] FIG. 169 shows expression of HN/NA chimera protein. Avian cells were transfected with vector (lanes 1 and 4) or with cDNAs encoding the influenza NA (and HA) (lane 2) or a cDNA encoding the HN/NA chimera (lane 3). Proteins in the resulting cell extracts were immunoprecipitated with anti-influenza antibody and the precipitated proteins resolved on polyacrylamide gels.

[0244] FIG. 170 shows incorporation of HN/NA chimera into VLPs. Avian cells were transfected with cDNAs indicated at the top of each lane. Cells were radioactively labeled from 40-48 hours post transfection and particles released from cells were purified by sedimentation through a 20% sucrose pad. Radioactive proteins associated with the particles were resolved on polyacrylamide gels and visualized by autoradiography.

[0245] FIG. 171 shows influence of different NDV proteins on the incorporation of the HN/NA chimera into ND VLPs. The cDNA encoding the HN/NA chimera was co-transfected with cDNAs indicated at the bottom of each lane. Radioactively labeled particles were purified, lysed, and proteins immunoprecipitated with anti-influenza antisera. The HN/NA chimera protein in each precipitate was resolved on polyacrylamide gels and visualized by autoradiography.

[0246] FIG. 172 shows silver stain of VLPs. Proteins in purified VLPs, separated on polyacrylamide gels, were visualized by silver staining. Egg-grown B1 virus is also shown.

[0247] FIG. 173 shows ELISA titers of serum antibodies after immunization with VLP: Graph shows antibody titers (defined in FIG. 11) in serum collected at 10, 20, 37, and 49 days post immunization with VLPs. The initial immunization dose for each group of five mice is shown at the bottom (microgram of protein). A boost of 10 micrograms of VLP protein was given to each mouse at day 27. Horizontal line, average values for each group.

[0248] FIG. 174 shows ELISA titers of serum antibodies after immunization with virus: Graph shows antibody titers (defined in FIG. 173) in serum collected at 10, 20, 37, and 49 days post immunization with UV inactivated NDV. The initial immunization dose for each group of five mice is shown at the bottom (microgram of protein). A boost of 10 micrograms of virion protein was given to each mouse at day 27. Horizontal line shows average values for each group.

[0249] FIG. 175 shows CTL activity of spleen cells after immunization with different concentrations of VLPs and Virus. Effector-to-target ratios (E/T) are shown at the bottom and the percent specific lysis is shown on the y-axis. Results at each point are the average of the five mice in the group. The spontaneous chromium release was 10%.

[0250] FIG. 176 shows intracellular cytokine staining of CD8+ and CD4+ cells. Spleen cells harvested from each mouse at 50 days post immunization and stimulated in vitro for 6 days with NDV infected P815 cells were strained for intracellular gamma interferon and for surface expression of either CD8 or CD4 using standard protocols. Cells were sorted by FACS and the percent of total cells positive for both CD8 and gamma interferon are shown in the left panel while the percent of total cells positive for both CD4 and gamma interferon are shown in the right panel. Results from spleen cell cultures from individual mice are shown as circles and horizontal lines indicate average values. CD3 positive cells are a positive control for stimulation.

[0251] FIG. 177 shows an expression construct containing the ectodomain and TM domain from a type 1 glycoprotein of the exemplary influenza HA, and CT domain from NDV F protein.

[0252] FIG. 178 shows the CT domain from NDV HN, and the TM and ectodomain from a type 2 glycoprotein of the exemplary influenza NA.

[0253] FIG. 179 shows the amino acid sequence (SEQ ID NO: 185) for Fujian strain of influenza HA protein.

[0254] FIG. 180 shows the nucleotide sequence (SEQ ID NO: 208) encoding Fujian strain of influenza HA protein.

[0255] FIG. 181 shows the amino acid sequence (SEQ ID NO: 114) for Fujian strain of influenza NA protein.

[0256] FIG. 182 shows the nucleotide sequence (SEQ ID NO: 132) encoding Fujian strain of influenza NA protein.

[0257] FIG. 183 shows the amino acid sequence (SEQ ID NO: 228) for M protein from Newcastle Disease Virus (NDV) strain Hertz (GenBank Accession Number AF431744).

[0258] FIG. 184 shows the nucleotide sequence (SEQ ID NO: 239) encoding M protein from Newcastle Disease Virus (NDV) strain Hertz (GenBank Accession Number AF431744).

[0259] FIG. 185 shows the amino acid sequence (SEQ ID NO: 229) for M protein from Newcastle Disease Virus (NDV) strain B1 (GenBank Accession Number NC_{—}002617).

[0260] FIG. 186 shows the nucleotide sequence (SEQ ID NO: 240) encoding M protein from Newcastle Disease Virus (NDV) strain B1 (GenBank Accession Number NC_{—}002617).

[0261] FIG. 187 shows the amino acid sequence (SEQ ID NO: 230) for M protein from Newcastle Disease Virus (NDV) strain Anhing a (GenBank Accession Number AY562986).

[0262] FIG. 188 shows the nucleotide sequence (SEQ ID NO: 241) encoding M protein from Newcastle Disease Virus (NDV) strain Anhing a (GenBank Accession Number AY562986).

[0263] FIG. 189 shows the amino acid sequence (SEQ ID NO: 231) for M protein from Newcastle Disease Virus (NDV) strain dove (GenBank Accession Number AY562989).

[0264] FIG. 190 shows the nucleotide sequence (SEQ ID NO: 242) encoding M protein from Newcastle Disease Virus (NDV) strain dove (GenBank Accession Number AY562989).

[0265] FIG. 191 shows the amino acid sequence (SEQ ID NO: 232) for M protein from Newcastle Disease Virus (NDV) strain Fontana/72 (GenBank Accession Number AY562988).

[0266] FIG. 192 shows the nucleotide sequence (SEQ ID NO: 243) encoding M protein from Newcastle Disease Virus (NDV) strain Fontana/72 (GenBank Accession Number AY562988).

[0267] FIG. 193 shows the amino acid sequence (SEQ ID NO: 233) for M protein from Newcastle Disease Virus (NDV) strain Largo (GenBank Accession Number AY562990).

[0268] FIG. 194 shows the nucleotide sequence (SEQ ID NO: 244) encoding M protein from Newcastle Disease Virus (NDV) strain Largo (GenBank Accession Number AY562990).

[0269] FIG. 195 shows the amino acid sequence (SEQ ID NO: 234) for M protein from Newcastle Disease Virus (NDV) Strain LaSota (GenBank Accession Number AY845400).

[0270] FIG. 196 shows the nucleotide sequence (SEQ ID NO: 245) encoding M protein from Newcastle Disease Virus (NDV) Strain LaSota (GenBank Accession Number AY845400).

[0271] FIG. 197 shows the amino acid sequence (SEQ ID NO: 235) for M protein from Newcastle Disease Virus (NDV) Pigeon (GenBank Accession Number AJ880277).

[0272] FIG. 198 shows the nucleotide sequence (SEQ ID NO: 246) encoding M protein from Newcastle Disease Virus (NDV) Pigeon (GenBank Accession Number AJ880277).

[0273] FIG. 199 shows the amino acid sequence (SEQ ID NO: 236) for M protein from Newcastle Disease Virus (NDV), strain Italien (GenBank Accession Number EU293914).

[0274] FIG. 200 shows the nucleotide sequence (SEQ ID NO: 246) encoding M protein from Newcastle Disease Virus (NDV), strain Italien (GenBank Accession Number EU293914).

[0275] FIG. 201 shows the amino acid sequence (SEQ ID NO: 237) for M protein from Newcastle Disease Virus (NDV) strain ZJ1 (GenBank Accession Number AF431744).

[0276] FIG. 202 shows the nucleotide sequence (SEQ ID NO: 248) encoding M protein from Newcastle Disease Virus (NDV) strain ZJ1 (GenBank Accession Number AF431744).

[0277] FIG. 203 shows the amino acid sequence (SEQ ID NO: 238) for M protein from Newcastle Disease Virus (NDV), strain Ulster (GenBank Accession Number AY562991).

[0278] FIG. 204 shows the nucleotide sequence (SEQ ID NO: 249) encoding M protein from Newcastle Disease Virus (NDV), strain Ulster (GenBank Accession Number AY562991).

[0279] FIG. 205 shows the amino acid sequence (SEQ ID NO: 250) of Presenilin (human) protein (type 3 protein).

[0280] FIG. 206 shows the amino acid sequence (SEQ ID NO: 251) of an ectodomain of Influenza Virus Fujian strain HA protein.

[0281] FIG. 207 shows the amino acid sequence (SEQ ID NO: 252) of an ectodomain of CMV gB protein.

[0282] FIG. 208 shows the amino acid sequence (SEQ ID NO: 253) of an ectodomain of CMV gH protein.

[0283] FIG. 209 shows the amino acid sequence (SEQ ID NO: 254) of an ectodomain of Ebola G protein.

[0284] FIG. 210 shows the amino acid sequence (SEQ ID NO: 255) of an ectodomain of Influenza virus HA H1 protein.

[0285] FIG. 211 shows the amino acid sequence (SEQ ID NO: 256) of an ectodomain of Influenza virus B HA protein.

[0286] FIG. 212 shows the amino acid sequence (SEQ ID NO: 257) of an ectodomain of Influenza virus H3 HA protein.

[0287] FIG. 213 shows the amino acid sequence (SEQ ID NO: 258) of an ectodomain of HIV envelope protein.

[0288] FIG. 214 shows the amino acid sequence (SEQ ID NO: 259) of an ectodomain of HSV gH protein.

[0289] FIG. 215 shows the amino acid sequence (SEQ ID NO: 260) of an ectodomain of Influenza virus H7 HA protein.

[0290] FIG. 216 shows the amino acid sequence (SEQ ID NO: 261) of an ectodomain of Influenza virus H9 protein.

[0291] FIG. 217 shows the amino acid sequence (SEQ ID NO: 262) of an ectodomain of Influenza Virus H5 protein.

[0292] FIG. 218 shows the amino acid sequence (SEQ ID NO: 263) of an ectodomain of Nipah virus F protein.

[0293] FIG. 219 shows the amino acid sequence (SEQ ID NO: 264) of an ectodomain of Respiratory Syncytial virus F protein.

[0294] FIG. 220 shows the amino acid sequence (SEQ ID NO: 265) of an ectodomain of Respiratory Syncytial virus F protein.

[0295] FIG. 221 shows the amino acid sequence (SEQ ID NO: 266) of an ectodomain of SARS virus S glycoprotein.

[0296] FIG. 222 shows the amino acid sequence (SEQ ID NO: 267) of an ectodomain of Varicella Zoster Virus gB protein.

[0297] FIG. 223 shows the amino acid sequence (SEQ ID NO: 268) of an ectodomain of Varicella Zoster Virus gE protein.

[0298] FIG. 224 shows the amino acid sequence (SEQ ID NO: 269) of an ectodomain of Varicella Zoster Virus gI protein.

[0299] FIG. 225 shows the amino acid sequence (SEQ ID NO: 270) of an ectodomain of Influenza Virus Fujian strain NA protein.

[0300] FIG. 226 shows the amino acid sequence (SEQ ID NO: 271) of an ectodomain of Metapneumovirus G protein.

[0301] FIG. 227 shows the amino acid sequence (SEQ ID NO: 272) of an ectodomain of Influenza Virus B NA protein.

[0302] FIG. 228 shows the amino acid sequence (SEQ ID NO: 273) of an ectodomain of Human metapneumovirus G protein.

[0303] FIG. 229 shows the amino acid sequence (SEQ ID NO: 274) of an ectodomain of Human respiratory syncytial virus G

[0304] FIG. 230 shows the amino acid sequence (SEQ ID NO: 275) of an ectodomain of Influenza virus N1 NA protein.

[0305] FIG. 231 shows the amino acid sequence (SEQ ID NO: 276) of an ectodomain of Influenza virus N3 NA protein.

[0306] FIG. 232 shows the amino acid sequence (SEQ ID NO: 277) of an ectodomain of Influenza virus N2 NA protein.

[0307] FIG. 233 shows the amino acid sequence (SEQ ID NO: 278) of an ectodomain of Measles virus HA protein.

[0308] FIG. 234 shows the amino acid sequence (SEQ ID NO: 279) of an ectodomain of Mumps virus HN protein.

[0309] FIG. 235 shows the amino acid sequence (SEQ ID NO: 280) of an ectodomain of Nipah virus G protein.

[0310] FIG. 236 shows the amino acid sequence (SEQ ID NO: 281) of an ectodomain of Parainfluenza 2 virus HN protein.

[0311] FIG. 237 shows the amino acid sequence (SEQ ID NO: 282) of an ectodomain of Parainfluenza virus 3 HN protein.

[0312] FIG. 238 shows the amino acid sequence (SEQ ID NO: 283) of an ectodomain of Vaccinia virus surface protein.

[0313] FIG. 239 shows the amino acid sequences (SEQ ID NOs: 284-285) of exemplary ectodomains of Prion protein.

[0314] FIG. 240 shows the amino acid sequence (SEQ ID NO: 292) of an ectodomain of Hepatitis B virus L form of HBsAg protein.

[0315] FIG. 241 shows construction of an NDV HN/RSV Ga chimera. In one embodiment, the NDV HN CT is of strain AV (Table 5). In one embodiment, the NDV TM is a slight modification of the sequence shown for strain AV in Table 5 (missing Carboxyl terminal M residue). In one embodiment, the G domain is from RSV strain a, exemplified by Ga ectodomain GenBank Accession # AF035006. Alternatively, the G domain is from RSV strain b, exemplified by Gb ectodomain GenBank Accession #AY353550.

[0316] FIG. 242 shows sequences of an exemplary NDV HN/RSV Ga chimera: A) shows the amino acid sequence (SEQ ID NO: 385) of NDV HN/RSV Ga chimera. The boxed sequence is the NDV HN CT and TM domains. 1) shows the NDV HN CT domain (SEQ ID NO: 117 of Table 5), 2) shows NDV HN TM domain (SEQ ID NO:386), and 3) shows RSV Ga ectodomain (SEQ ID NO: 387). The NDV TM (SEQ ID NO: 386) is the same as SEQ ID NO:136 of Table 5, with the exception of lacking the C-terminal M residue. B) shows the nucleotide sequence encoding the NDV HN/RSV Ga chimera: 1) is the NDV HN CT and TM domains (SEQ ID NO: 388), and 2) is the RSV Ga Ectodomain (SEQ ID NO: 389) (GenBank Accession # AF035006).

[0317] FIG. 243 shows sequences of an exemplary NDV HN/RSV Gb chimera: A) shows the amino acid sequence of NDV HN/RSV Gb chimera (SEQ ID NO: 390). The boxed sequence is the NDV HN CT and TM domains, which is the same as in FIG. 242 (A). 1) shows the NDV HN CT domain (SEQ ID NO:117 of Table 5), 2) shows NDV HN TM domain (SEQ ID NO:386), and 3) shows RSV Gb ectodomain (SEQ ID NO:391). The NDV TM (SEQ ID NO: 386) is the same as SEQ ID NO:136 of Table 5, with the exception of lacking the C-terminal M residue. B) shows the nucleotide sequence of NDV HN/RSV Gb chimera: 1) is the NDV HN CT and TM domains (SEQ ID NO:388), and 2) is the RSV Gb Ectodomain (SEQ ID NO:392) (GenBank Accession # AY353550).

[0318] FIG. 244 shows a Western analysis of chimera proteins expressed in different cell types. Expression in different cell types resulted in different levels of glycosylation. Similar results were obtained with wild type G protein (not shown).

[0319] FIG. 245 shows characterization of VLP-Ga released from avian cells. ND VLPs containing NDV M, NP and H/G were released from avian cells. More efficient release of VLPS was observed following the addition of heparin to the transfected cells. The H/G chimera protein was approximately 15-20% of the total VLP protein. M and NP, NDV membrane and nucleocapsid protein; H/G, chimera protein; V, vector DNA.

[0320] FIG. 246 shows Characterization of VLP-Ga released from COS-7 cells. ND VLPs containing NDV M, NP and H/Ga were released from COS-7 cells. More efficient release of VLPS was observed following the addition of heparin to transfected cells. The H/Ga chimera protein was approximately 15-20% of the total VLP protein. M and NP, NDV membrane and nucleocapsid protein; H/G, chimera protein; V, vector DNA.

[0321] FIG. 247 shows antibody responses to increasing doses of VLP-H/G. Antibody levels to the G protein were determined by ELISA assays using RSV infected VERO cell extracts as capture antigen. Average of results from each group of five mice are shown. Error bars indicate the standard deviation of responses within each group. Sera were diluted 1/100.

[0322] FIG. 248: shows comparison of antibody responses to RSV G protein after immunization with VLP-H/G, UV-RSV, and live RSV. To compare antibody responses to the G protein after immunization with VLP-H/G or RSV, ELISA assays were accomplished using as capture antigen extracts from avian cells transfected with cDNA encoding the RSV G protein. As determined by Western analysis, the amount of G protein in the avian extract used was the same as the amount of G protein in the RSV infected VERO cell extracts used in the figure above. Error bars indicate standard deviation of responses within each group of five mice. Results are shown for days 14, 21 and 28.

[0323] FIG. 249: Mice immunized with 30 μg VLP-H/G and boosted with 10 μg of VLP-H/G (IP) were challenged (IN) with 3×10⁶ pfU of RSV. Control mice were immunized and boosted with live RSV (3×10⁶ pfu IN). Another set of mice received no immunization. Four days after challenge, the titer of virus in lungs was determined by plaque assay. Virus was detected only in mice not previously immunized. Values shown in immunized mice are the limit of detection in the assay.

[0324] FIG. 250 shows scores of inflammation of lung tissue: Tissue sections obtained at 4 days after RSV challenge were stained with H and E. At least 10 fields for each group were blindly scored for inflammation of blood vessels, airways, and alveolar spaces. The scores for each mouse are shown in the tables. Differences between RSV and VLP immunized mice were not statistically significant.

### DETAILED DESCRIPTION OF THE INVENTION

[0325] The present invention discloses methods of making and using a novel, non-infective, paramyxovirus vaccine. Paramyxovirus structural proteins within a virus-like particle (VLP) comprise one example of such a vaccine. It is observed that the presence of matrix protein, alone, is sufficient and necessary to provide an effective VLP release. Co-expression of four paramyxovirus structural proteins, however, results in the release of non-infective VLPs with densities and efficiencies of release similar to that of infective particles. Representative diseases wherein a VLP vaccine might be useful include, but are not limited to, Newcastle disease, measles, respiratory syncytial virus infection, and parainfluenza 3 virus infection.

[0326] The present invention relates to the field of viral vaccines. In one embodiment, the present invention contemplates a paramyxoviral vaccine effective against diseases such as, but not limited to, Newcastle disease, measles, parainfluenza virus 3, and respiratory syncytial virus. In one embodiment, the present invention contemplates a vaccine comprising Newcastle disease virus-like particles (VLP). In one embodiment, the present invention contemplates a method comprising transfecting avian cells with cDNAs encoding major NDV structural proteins. In another embodiment, a method wherein particles resembling infectious virions are released with nearly 100% efficiency. In one embodiment, the particles are non-infectious and provide a safe and effective NDV vaccine.

[0327] Paramyxoviruses have a negative, single-stranded RNA genome which is usually linear. Paramyxovirus morphology comprises a relatively spherical shape having diameters ranging between approximately 150-350 nanometers (nm). Generally, the genomes are packaged with nucleoprotein into ribonucleoprotein cores. Polymerase proteins may also be associated with these ribonucleoprotein cores which play a role in early infection replication and transcription processes. The matrix protein is a prominent feature of paramyxoviruses and lines the inner face of the viral membrane. Transmembrane proteins (i.e., for example, heamaglutinin, fusion or neuraminidase proteins) all form homo-oligomeric complexes (i.e., known in the art as spike proteins) and assist with virus assembly localized at the host cell plasma membrane. Garoff et al., “Virus Maturation By Budding” Microbiol Mol Biol Rev 62:1171-1190 (1998).

### I. Viral Structure and Assembly

[0328] Paramyxoviruses are enveloped and known to assemble their virion components at the plasma membrane of infected cells and subsequently release progeny particles by the process of budding. Newcastle disease virus (NDV), measles, parainfluenza virus 3, and respiratory syncytial virus all belong to Paramyxoviridae, characterized as an enveloped virus with a genomic negative-stranded RNA (i.e., for example, approximately 16 KB) that is packaged with nucleoprotein into a ribonucleoprotein (RNP) core.

[0329] The paramyxovirus RNP core also contains the polymerase complex, which is composed of a Phosphoprotein and Large Polymerase. The RNP core is encased in a membrane which contains two transmembrane glycoproteins, the hemagglutinin-neuraminidase (HN) and the fusion (F) proteins, as well as the matrix (M) protein, which is associated with the inner surface of the lipid-containing viral envelope. Lamb et al., “Paramyxoviridae: The Viruses and Their Replication” pp. 1305-1340. In: Fields Virology, Third Edition, Vol. 1., Eds: D. M. K. &. P. M. Howley, LippincottWilliams & Wilkins, Philadelphia (2001).

[0330] The matrix protein of many enveloped RNA viruses are believed to play a role in virus assembly and budding. Freed, E. O., “The HIV-TSGI01 interface: recent advances in a budding field” Trends Microbiol. 11:56-9 (2003); Jasenosky et al., “Filovirus budding” Virus Res. 106:1B1-8 (2004); Jayakar et al., “Rhabdovirus assembly and budding” Virus Res. 106:117-32 (2004); Peeples M. E., “Paramyxovirus M proteins: pulling it all together and taking it on the road” pp. 427-456. In: The Paramyxoviruses, Ed: D. W. Kingsbury, Plenum, New York, N.Y. (1991); Pornillos et al., “Mechanisms of enveloped RNA virus budding” Trends Cell Biol. 12:569-79 (2002); Schmitt et al., “Escaping from the cell: assembly and budding of negative-strand RNA viruses” Cuff Top Microbiol Immunol 283:145-96 (2004); and Takimoto et al., “Molecular mechanism of paramyxovirus budding” Virus Res. 106:133-45 (2004). However, expression of the retroviral gag precursor protein, in the absence of other viral components, also results in the assembly and release of gag virus-like particles (VLPs) from the plasma membrane. Delchambre et al., “The GAG precursor of simian immunodeficiency virus assembles into virus-like particles” EMBO J 8:2653-60 (1989); Demirov et al., “Retrovirus budding” Virus Res 106:87-102 (2004); Gheysen et al., “Assembly and release of HIV-1 precursor Pr55gag virus-like particles from recombinant baculovirus-infected insect cells” Cell 59:103-12 (1989); and Morita et al., “Retrovirus budding” Annu Rev Cell Dev Biol. 20:395-425 (2004). It has been unclear, therefore, which NDV proteins are sufficient and necessary to direct viral particle formation and release.

[0331] A. M Proteins

[0332] In one embodiment, the present invention contemplates a method comprising an M protein from a paramyxovirus, without any additional glycoproteins, wherein VLPs are created.

[0333] M proteins isolated from:

[0334] i) Ebola virus (Jasenosky et al., “Filovirus budding” Virus Res. 106: 1B1-8 (2004); Jasenosky et al., “Ebola virus VP40-induced particle formation and association with the lipid bilayer” J. Virol. 75:5205-14 (2001); and Timmins et al., “Vesicular release of Ebola virus matrix protein VP40” Virology 283: 1-6 (2001));

[0335] ii) vesicular stomatitis virus (Jayakar et al., “Rhabdovirus assembly and budding” Virus Res. 106:117-32 (2004); Li et al., “Viral liposomes released from insect cells infected with recombinant baculovirus expressing the matrix protein of vesicular stomatitis virus” J. Virol. 67:4415-20 (1993); and Sakaguchi et al., “Double-layered membrane vesicles released from mammalian cells infected with Sendai virus expressing the matrix protein of vesicular stomatitis virus” Virology 263:230-43 (1999))

[0336] and, iii) influenza virus (Gomez-Puertas et al., “Influenza virus matrix protein is the major driving force in virus budding” J. Virol. 74:11538-47 (2000)), when expressed alone, assemble into and are released as VLPs.

[0337] Conversely, M protein-deficient rabies virus is known to be severely impaired in virion formation. Mebatsion et al., “Matrix protein of rabies virus is responsible for the assembly and budding of bullet-shaped particles and interacts with the transmembrane spike glycoprotein G” J. Virol. 73:242-50 (1999).

[0338] Studies in several paramyxovirus systems have also suggested a role for the M protein in virus assembly and budding. Measles virus (MV) and Sendai virus (SV) modified by reverse genetics to lack the M protein genes were impaired in budding. Cathomen et al., “A matrix-less measles virus is infectious and elicits extensive cell fusion: consequences for propagation in the brain” EMBO J 17:3899-3908 (1998); and Inoue et al., “A new Sendai virus vector deficient in the matrix gene does not form virus particles and shows extensive cell-to-cell spreading” J. Virol. 77:6419-29 (2003), respectively. Moreover, MV containing mutant M protein derived from subacute sclerosing panencephalitis (SSPE) virus was also defective in budding. Patterson et al., “Evidence that the hypermutated M protein of a subacute sclerosing panencephalitis measles virus actively contributes to the chronic progressive CNS disease” Virology 291:215-25 (2001).

[0339] Recent studies of paramyxovirus assembly have also focused on identifying the viral protein requirements for assembly and budding of VLPs and have demonstrated a role for the M protein. The human parainfluenza virus type 1 (hPIV1) M protein and the SV M protein expressed alone induced budding of VLPs from the plasma membrane. Coronel et al., “Human parainfluenza virus type 1 matrix and nucleoprotein genes transiently expressed in 12 mammalian cells induce the release of virus-like particles containing 13 nucleocapsid-like structures” J. Virol. 73:7035-8 (1999); Sakaguchi et al., “Double-layered membrane vesicles released from mammalian cells infected with Sendai virus expressing the matrix protein of vesicular stomatitis virus” Virology 263:230-43 (1999); Sugahara et al., “Paramyxovirus Sendai virus-like particle formation by expression of multiple viral proteins and acceleration of its release by C protein” Virology 325:1-10 (2004); and Takimoto et al., “Role of matrix and fusion proteins in budding of Sendai virus” J. Virol. 75: 11384-91 (2001). Expression of M protein was also required for Simian Virus 5 (SV5) VLP formation. Schmitt et al., “Requirements for budding of paramyxovirus simian virus virus-like particles” J Virol 76:3952-64 (2002).

[0340] However, in contrast to PIY1 and SV, the SV5 M protein was not sufficient for VLP release. Rather, simultaneous expression of SV5 M protein, together with NP and either of the glycoproteins was required. Although existing reports agree upon a role for M protein as a budding organizer in paramyxovirus particle release, there are differences in the protein requirements for assembly and budding of virions. The budding capacities of retrovirus gag protein, Ebola virus M protein, and influenza M1 protein are attributed, in part, to Late Domains (infra). Demirov et al., “Retrovirus budding” Virus Res 106:87-102 (2004); Freed, E. O., “Viral late domains” J. Virol. 76:4679-87 (2002); Jasenosky et al., “Filovirus budding” Virus Res. 106: 1B1-8 (2004); Jayakar et al., “Rhabdovirus assembly and budding” Virus Res. 106:117-32 (2004); Morita et al., “Retrovirus budding” Annu Rev Cell Dev Biol. 20:395-425 (2004); Nayak et al., “Assembly and budding of influenza virus” Virus Res 106:147-65 (2004); Pornillos et al., “Mechanisms of enveloped RNA virus budding” Trends Cell Biol. 12:569-79 (2002); Schmitt et al., “Escaping from the cell: assembly and budding of negative-strand RNA viruses” Cuff Top Microbiol Immunol 283:145-96 (2004); Strack et al., “AIP 1/ALIX is a binding partner for HIV-1 p6 and EIA V p9 functioning in virus budding” Cell 114:689-99 (2003); and von Schwedler et al., “The protein network of HIV budding” Cell 4:701-13 (2003).

[0341] B. Late Domains

[0342] Late Domains are short peptide motifs that mediate interactions with a member of the class E proteins, which are involved in the vacuolar protein sorting (VPS) pathway. The Late Domain promotes budding by interacting with components of the cellular machinery responsible for sorting cargo into multivesicular bodies (MVB). The formation of MVB vesicles and the budding of a virus are topologically similar processes. Available evidence suggests that enveloped RNA viruses bud by co-opting the cellular machinery that is normally used to create MVB inside the cell. Carter, C. A., “Tsg101: HIV-1's ticket to ride” Trends Microbiol. 10:203-205 (2002); Demirov et al., “Retrovirus budding” Virus Res 106:87-102 (2004); Freed, E. O., “The HIV-TSGI01 interface: recent advances in a budding field” Trends Microbiol. 11:56-9 (2003); Freed, E. O., “Viral late domains” J. Virol. 76:4679-87 (2002); Garrus et al., “Tsg 1-01 and the vacuolar protein sorting pathway are essential for HIV-1 budding” Cell 107:55-65 (2001); Morita et al., “Retrovirus budding” Annu Rev Cell Dev Biol. 20:395-425 (2004); Pornillos et al., “Mechanisms of enveloped RNA virus budding” Trends Cell Biol. 12:569-79 (2002); Pornillos et al., “HN Gag mimics the TsgI01-recruiting activity of the human Hrs protein” J Cell Biol 162:425-34 (2003); Strack et al., “AIP 1/ALIX is a binding partner for HIV-1 p6 and EIA V p9 functioning in virus budding” Cell 114:689-99 (2003); von Schwedler et al., “The protein network of HIV budding” Cell 4:701-13 (2003). Martindale, D., “Budding viral hijackers co-opt the endocytic machinery to make a getaway” J. Biol. 3:2 (2003); and Simons et al., “The budding mechanisms of enveloped animal viruses” J. Gen. Virol. 50:1-21 (1980).

[0343] In one embodiment, the present invention contemplates that dominant negative mutant protein component of the VPS pathway may also inhibit particle release. In one embodiment, an YXXL (SEQ ID NO:3) sequence in the NDV M protein has properties of a Late Domain. Although it is not necessary to understand the mechanism of an invention, it is believed that the YXXL mutation abolishes particle release while substitution of late domains such as YPDL and/or PTAP fully restore particle release.

[0344] C. Budding

[0345] Within the paramyxovirus family, it is known that the VPS pathway is involved in the SV5 budding. It was shown that a dominant-negative mutation VPS4(E228Q) (an ATPase required for recycling protein complexes involved in the VPS pathway) inhibited budding of SV5 virions as well as VLPs. Schmitt et al., “Evidence for a new viral late-domain core sequence, FPIV, necessary for budding of a paramyxovirus” J. Virol. 79:2988-97 (2005). Since it is known that VPS4(E228Q) also inhibits the VPS pathway, one may believe that the VPS pathway is involved in SV5 budding. In addition, a putative Late Domain in SV5 M was identified. However, SV5 M protein is not sufficient for VLP formation and release, complicating the interpretation of this result. Thus, the general rules for assembly and release of paramyxoviruses are not yet clear. Schmitt et al., “Requirements for budding of paramyxovirus simian virus virus-like particles” J Virol 76:3952-64 (2002). Open questions include: i) the further definition of paramyxovirus late domains in viral structural proteins, ii) the role or contribution of each viral protein in virus assembly, and iii) the cellular factors involved in the assembly and budding process.

[0346] Various embodiments of the present invention answer these questions. In one embodiment, the present invention contemplates a method for producing NDV VLPs from cells transfected with nucleic acids encoding viral structural proteins. In another embodiment, the present invention contemplates transfecting with nucleic acid encoding an NDV M protein that is both necessary and sufficient for release of lipid-containing particles (i.e., for example VLPs). In another embodiment, the present invention contemplates that the most efficient incorporation (i.e., for example, almost 100%) of other viral proteins into VLPs requires the expression of M protein with at least two other NDV proteins. For example, it is known that dominant-negative mutations of CHMP3 and Vps4 proteins (both components of the host VPS system) inhibited release of VLPs. Morita et al., “Retrovirus budding” Annu Rev Cell Dev Biol. 20:395-425 (2004); Strack et al., “AIP 1/ALIX is a binding partner for HIV-1 p6 and EIA V p9 functioning in virus budding” Cell 114:689-99 (2003); and von Schwedler et al., “The protein network of HIV budding” Cell 4:701-13 (2003). It is further contemplated that AIP1 is also incorporated into VLPs thereby playing a role in NDV particle budding.

[0347] D. Dominant Negative Mutations

[0348] The dominant negative Vps4 protein may block release of SV5 virions or VLPs composed of NP, HN, F, and M proteins, implicating the VPS system in paramyxovirus release. Schmitt et al., “Evidence for a new viral late-domain core sequence, FPIV, necessary for budding of a paramyxovirus” J. Virol. 79:2988-2997 (2005). Confirming these results, a dominant negative version of Vps4, Vps4 A-E228Q, blocked NDV VLP release. Martin-Serrano et al., “Role of ESCRT-I in retroviral budding” J Virol 77:4794-4804 (2003); Strack et al., “AIP1/ALIX is a binding partner for HIV-1 p6 and EIAV p9 functioning in virus budding” Cell 114:689-699 (2003); and von Schwedler et al., “The protein network of HIV budding” Cell 114:701-713 (2003)).

[0349] Although it is not necessary to understand the mechanism of an invention, it is believed that the results demonstrated herein show that these dominant negative proteins blocked release of particles containing only M protein. For example, a dominant negative version of CHMP3, a subunit of the ESCRT III complex (1), and a dominant negative mutant of AIP1, a protein that binds both ESCT I and III proteins, inhibited NDV VLP release as well as release of particles containing only M protein. This inhibition was not due to over expression of the protein since transfection of the wild type versions of these proteins had little effect on M particle release. These results show that an intact VPS pathway facilitates NDV VLP budding. Furthermore, these results indicate that the VPS pathway is involved in M particle release.

[0350] Many studies have demonstrated that L domains in the matrix proteins of viruses mediate their interaction with specific molecules of the VPS pathway. Bieniasz, P. D., “Late budding domains and host proteins in enveloped virus release” Virology 344:55-63 (2006); Freed, E. O., “Viral late domains” J. Virol. 76:4679-4687 (2002); and Morita et al., “Retrovirus budding” Annu Rev Cell Dev Biol 20:395-425 (2004). Three L domain motifs, PTAP, YPXL, and PPXY (Pornillos et al., “Mechanisms of enveloped RNA virus budding” Trends Cell Biol. 12:569-579 (2002)), have been identified in retroviruses (Puffer et al., “Equine infectious anemia virus utilizes a YXXL motif within the late assembly domain of the Gag p9 protein” J Virol 71:6541-6546 (1997)), rhabdoviruses and filoviruses (Irie et al., “Budding of PPxY-containing rhabdoviruses is not dependent on host proteins TGS101 and VPS4A” J Virol 78:2657-2665 (2004)). An YRKL sequence has been identified as a late domain in orthomyxoviruses (Hui et al., “YRKL sequence of influenza virus M1 functions as the L domain motif and interacts with VPS28 and Cdc42” J Virol 80:2291-2308 (2006)).

[0351] Binding of the PTAP sequence to TSG101 (tumor susceptibility gene 101) protein, a component of ESCRT I, has been reported. Huang et al., “p6Gag is required for particle production from full-length human immunodeficiency virus type 1 molecular clones expressing protease” J Virol 69:6810-6818 (1995). Further, the YPXL sequence has been shown to interact with AP2 (adaptor protein 2) and AIP1. Chen et al., “Functions of early (AP-2) and late (AIP/ALIX) endocytic proteins in equine infectious anemia virus budding” J Biol Chem (2005); and Strack et al., “AIP1/ALIX is a binding partner for HIV-1 p6 and EIAV p9 functioning in virus budding” Cell 114:689-699 (2003), respectively. The YRKL sequence in the influenza virus M1 protein binds to VSP28, an ESCRT1 protein that binds tsg101, as well as Cdc42, a member of the Rho family of GTP-binding proteins. The PPXY motif binds to Nedd4-like (neural precursor cell expressed, developmentally down regulated gene 4) ubiquitin ligases. Vana et al., “Role of Nedd4 and ubiquitination of Rous sarcoma virus Gag in budding of virus-like particles from cells” J Virol 78:13943-13953 (2004); and Xiang et al., “Fine mapping and characterization of the Rous sarcoma virus Pr76gag late assembly domain” J Virol 70:5695-5700 (1996)).

[0352] Paramyxovirus M proteins do not have a PTAP, an YPXL, an YRKL, or a PPXY motif. The sequence FPIV, however, in the SV5 M protein may be a late domain in paramyxoviruses. Mutation of FPIV inhibited release of particles and addition of this sequence in a retrovirus gag construct stimulated the release of particles. However, since the SV5 M protein is not sufficient for SV5 particle release, FPIV is not believed to function independently as a late domain in the context of this paramyxovirus M protein. Schmitt et al., “Evidence for a new viral late-domain core sequence, FPIV, necessary for budding of a paramyxovirus” J. Virol. 79:2988-2997 (2005).

[0353] Thus, it is not clear how SV5 uses the VPS pathway or how the FPIV sequence might function as a late domain. Sequence analysis of the NDV M protein shows the presence of this FPIV motif. In addition, NDV M protein contains a PKSP and a YANL sequence, not found in the SV5 M protein. In one embodiment, the present invention contemplates a YANL motif comprising properties of an L domain. In one embodiment, a YANL mutation reduces M protein particle release. Although it is not necessary to understand the mechanism of an invention, it is believed that substitution of a YANL mutation with other known late domains (i.e., for example, PTAP or YPDL) particle release may become fully restored.

[0354] It is further believed that inhibition of particle release by mutation of the YANL sequence is not likely due only to effects on protein folding. The data provided herein suggests that the NDV M protein may access the VPS pathway using either type of late domain, an YPDL or a PTAP domain and that the FPIV sequence in the NDV M protein may not function as a late domain independent of the YANL sequence since the YANL mutant protein M-A₂₃₂-A₂₃₅ has a wild type FPIV sequence.

[0355] YPDL late domains have been shown to interact with the VPS protein AIP1. In one embodiment, the present invention contemplates that AIP1 protein is found in released particles containing only M protein.

[0356] The M protein of Sendai virus has also been shown to be sufficient for release of particles (Sugahara et al., “Paramyxovirus Sendai virus-like particle formation by expression of multiple viral proteins and acceleration of its release by C protein” Virology 325:1-10 (2004); and Takimoto et al., “Role of matrix and fusion proteins in budding of Sendai virus” J. Virol. 75:11384-11391 (2001)). The Sendai virus M protein has an YLDL sequence, which could serve as a late domain for SV M protein. As noted above, the SV5 M protein is not sufficient for release of neither particles nor does it has an YXXL motif. Schmitt et al., “Requirements for budding of paramyxovirus simian virus 5 virus-like particles” J Virol 76:3952-3964 (2002). However, the SV5 NP protein has a number of YXXL motifs including a YPLL sequence. Alternatively, an SV5 late domain may be present on the SV5 NP rather than the M protein. Indeed, it has been reported that SV5 VLP release is significantly enhanced by the expression of the SV5 NP protein with M protein as well as a glycoprotein. Schmitt et al., “Requirements for budding of paramyxovirus simian virus 5 virus-like particles” J Virol 76:3952-3964 (2002). Consequently, it is clear that differential requirements for the release of particles in different paramyxovirus systems exist and may be due in part to different distributions of the late domains on structural proteins. Nevertheless, the present invention contemplates that the host cell VPS pathway facilitates M protein budding and that the YANL motif in the NDV M protein has the properties of a late domain.

### II. Virus-Like Particle (VLP) Formation and Release

[0357] In one embodiment, the present invention contemplates transfecting a host cell with nucleic acid encoding only a paramyxovirus M protein so that the transfected cells express the matrix protein and create paramyxoviral VLPs. In another embodiment, the present invention contemplates co-expression of two or more paramyxovirus glycoproteins including, but not limited to, NP, F-K115Q, and/or HN proteins (together with M protein) under conditions such that paramyxovirus VLP formation and release occurs.

[0358] The present invention contemplates conditions for the efficient generation of VLPs of a virulent paramyxoviral strain. In one embodiment, the paramyxoviral strain comprises the group including, but not limited to, Newcastle disease, measles, parainfluenza virus 3, or respiratory syncytial virus. In another embodiment, the VLPs comprise the same major antigens as infectious virus. In another embodiment, the VLPs comprise major antigens having the same ratios as infectious virus. In one embodiment, the major antigens are selected from the group comprising nucleocapsid protein, membrane/matrix protein, hemagglutinin-neuraminidase protein, and fusion protein.

[0359] The production of VLPs in accordance with embodiments of the present invention is much simpler and likely more cost effective than currently available live or attenuated virus vaccines. VLPs can be harvested from cell supernatants and purified by the same protocols used to purify virus. VLPs can be engineered to increase the spectrum of immune responses. The VLPs can also be engineered so that the immune response can be distinguished from that induced by an infection.

[0360] A. VLP Release Characteristics

[0361] In one embodiment, VLPs are released from cells co-expressing the major structural proteins of paramyxoviruses. In one embodiment, NDV VLP particles are released from a chicken fibroblast cell line co-expressing NP, M, F and HN proteins that can be purified and characterized. In one embodiment, an uncleaved version of F protein eliminated any potential effects of cell-to-cell fusion on virus release. In one embodiment, avian cells are used because birds are the natural host of NDV. For example, as detailed in the Examples below, cells (i.e., for example, avian or human) were co-transfected with plasmids encoding NDV viral proteins using concentrations of DNA previously determined to result in expression levels and ratios of proteins comparable to infected cells. Cells were then pulse-labeled with ³⁵S-methionine and ³⁵S-cysteine and then chased for 8 hours (a time also resulting in maximal particle release). VLPs in the cell supernatants were isolated and fractionated by sucrose density ultracentrifugation.

[0362] In one embodiment, the efficiency of paramyxoviral VLP release from cells expressing at least four viral proteins (85%) was comparable to the efficiency of infectious particle release from paramyxovirus-infected cells (92%). Although it is not necessary to understand the mechanism of an invention, it is believed that this result suggests that four paramyxovirus proteins (i.e., for example, M protein, NP protein, F, protein, or HN protein) may provide an efficient formation of particles. It is further believed that the viral Large Polymerase or Phosphoprotein proteins have little quantitative effect on virus release.

[0363] Although it is not necessary to understand the mechanism of an invention, it is believed that paramyxoviral VLPs, which can be isolated on sucrose gradients, have a relatively homogeneous density that is slightly less than the average density of an authentic virus. Although it is not necessary to understand the mechanism of an invention, it is believed that this result is likely due to the absence of the viral genomic RNA in the particles. It is further believed, therefore, that the VLPs are non-infectious.

[0364] Although it is not necessary to understand the mechanism of an invention, it is believed that paramyxoviral VLPs are likely folded into conformations virtually identical to an authentic virus and are packaged into particles in a manner identical to paramyxoviral particles. As a result, these particles should be as antigenic as authentic virus. VLPs do not, however, contain the viral genome, since the cells (i.e., for example, avian or human), which are forming and releasing these particles, are not infected with virus. Therefore, VLPs cannot be infectious and cannot cause disease.

[0365] B. M Protein Function

[0366] In one embodiment, a paramyxovirus M protein is both sufficient and necessary for VLP particle release. In one embodiment, the paramyxovirus is selected from the group including, but not limited to, Newcastle disease virus, measles virus, parainfluenza virus 3, and syncytial respiratory virus. That is to say, expression of the M protein alone resulted in very efficient release of M protein containing paramyxovirus VLP particles. For example, the efficiency of M protein release is comparable to that observed when at least four proteins were co-expressed. Although it is not necessary to understand the mechanism of an invention, it is believed that this result suggests that it is the M protein that directs the budding of paramyxovirus VLPs. Furthermore, VLPs are released when only M protein is present. Consequently, significant VLP particle release will not occur the absence of M protein even if viral protein expression (or co-expression of a combination of viral proteins) is present. For example, cells expressing HN protein, alone, released only trace amounts of a very light density HN protein-containing material into cell supernatants, and it is unlikely that this material reflects a significant component of virus assembly. In one embodiment, the present invention contemplates that no NDV protein, other than M protein, can function independently in the release of lipid containing particles that reflect virus assembly.

[0367] Although it is not necessary to understand the mechanism of an invention, it is believed that VLP particles released from cells expressing only M protein have very heterogeneous densities because this budding occurs indiscriminately from different cell membranes or from different plasma membrane domains and, consequently, contain different lipid-to-protein ratios due to variable M protein oligomerization. For example, particles formed from monomer M protein may have a higher lipid to protein ratio than particles formed from M protein in an oligomeric state. It is known that M proteins of other negative stranded RNA viruses can form oligomeric structures. Garoff et al., “Virus maturation by budding” Microbiol Mol Biol Rev 62:1171-90 (1998); and Panch et al., “In vivo oligomerization and raft localization of Ebola virus protein VP40 during vesicular budding” Proc Natl Acad Sci USA 100:15936-41 (2003).

[0368] C. Glycoprotein Function

[0369] Formation of infectious paramyxovirus virions is believed to involve the incorporation of both the HN and F glycoproteins. In one embodiment, the present invention contemplates a composition comprising glycoprotein incorporation into a paramyxovirus VLP when M protein is co-expressed with at least two glycoproteins. Single glycoprotein co-expression (i.e., for example HN+M or F+M) resulted in only trace amounts of either HN or F glycoprotein incorporated into VLP particles. Further, when HN and F glycoproteins were co-expressed with M protein, the glycoprotein incorporation levels were comparable to that observed with co-expression of at least four proteins.

[0370] Although it is not necessary to understand the mechanism of an invention, it is believed that these results indicate that the M protein binds more efficiently with a complex of HN and F glycoproteins. This possibility is also supported by observations that co-expression of these two glycoproteins with M protein resulted in paramyxovirus VLPs having a more homogenous and decreased density. M protein VLP particles generally have a very heterogeneous density. Co-expression of M protein with either glycoprotein, alone, did not change the general density of M protein containing particles. It is believed that these results indicate that interactions of M protein with an HN-F protein complex affected the protein to lipid ratio of the VLPs or affected the membrane from which the particles were released.

[0371] It should be noted that not just any combination of M protein and viral glycoproteins produce paramyxovirus VLPs in good yield as contemplated herein. For example, co-expression of a single glycoprotein and an M protein results in a 40-60% VLP release suppression when compared to VLP release observed after: i) co-expression with all four proteins; ii) expression of an M protein with at least two glycoproteins; and iii) expression of M protein alone. Empirical studies revealed that this release suppression is relieved by co-expression of M protein with NP and another glycoprotein.

[0372] Although it is not necessary to understand the mechanism of an invention, it is believed that VLP release suppression by a single glycoprotein+M protein is consistent with observations that NP+M protein VLP release is: i) 70% lower when compared to release from cells expressing at least four proteins; and ii) 80% lower when compared to release from cells expressing only M protein. Although it is not necessary to understand the mechanism of an invention, it is believed that the large amount of NP in the cytoplasm may pull M protein away from the plasma membrane, thereby preventing its association with this membrane and, therefore, budding of particles. Consequently, one hypothesis suggests that co-expression with another glycoprotein may redirect both NP and M protein to a cellular membrane thereby relieving VLP release suppression.

[0373] D. Vacuolar Protein Sorting (VPS) System and Multivesicular Buds (MVBs)

[0374] Although it is not necessary to understand the mechanism of an invention, it is believed that paramyxovirus M protein-dependent VLP release uses the host vacuolar protein sorting (VPS) system. The VPS system has been reported to mediate budding of other enveloped viruses. Morita et al., “Retrovirus budding” Annu Rev Cell Dev Biol. 20:395-425 (2004); and Pornillos et al., “Mechanisms of enveloped RNA virus budding” Trends Cell Biol. 12:569-79 (2002).

[0375] Budding of retroviruses, filoviruses, and influenza viruses are thought to depend upon the host cell VPS pathway. The VPS pathway also serves to form MVBs. Demirov et al., “Retrovirus budding” Virus Res 106:87-102 (2004); Jasenosky et al., “Filovirus budding” Virus Res. 106:1B1-8 (2004); Morita et al., “Retrovirus budding” Annu Rev Cell Dev Biol. 20:395-425 (2004); Pornillos et al., “Mechanisms of enveloped RNA virus budding” Trends Cell Biol. 12:569-79 (2002); Freed, E. O., “Viral late domains” J. Virol. 76:4679-87 (2002); and Schmitt et al., “Escaping from the cell: assembly and budding of negative-strand RNA viruses” Cuff Top Microbiol Immunol 283:145-96 (2004). MVBs are formed by invagination of endosomal membranes into the endosomallumen thereby creating a vesicle inside a vesicle. Martindale, D., “Budding viral hijackers co-opt the endocytic machinery to make a getaway” J Biol. 3:2 (2003). The topology of MVB formation is similar to that of virus budding from plasma membrane.

[0376] It has been proposed that viral proteins usurp this host cell machinery to direct virus budding. Demirov et al., “Retrovirus budding” Virus Res 106:87-102 (2004); Martindale, D., “Budding viral hijackers co-opt the endocytic machinery to make a getaway” J Biol. 3:2 (2003); and Morita et al., “Retrovirus budding” Annu Rev Cell Dev Biol. 20:395-425 (2004). Currently, research suggests that the formation of MVBs involves three protein complexes, first characterized in yeast, and are collectively known as the Endosomal Sorting Complexes Required for Transport (i.e., for example, ESCRT I, II, and III). Babst et al., “ESCRT-III: an endosome-associated heterooligomeric protein complex 4 required for MVB sorting” Dev Cell 3:271-282 (2002); Jiang et al., “Multivesicular bodies: a mechanism to package lytic and storage functions in one organelle?” Trends Cell Biol. 12:362-7 (2002); Katzmann et al., “Ubiquitin-dependent sorting into the multivesicular body pathway requires the function of a conserved endosomal protein sorting complex, ESCRT-I” Cell 106:145-55 (2001); and Katzmann et al., “Vps27 recruits ESCRT machinery to endosomes during MVB sorting” J Cell Biol. 162:413-23 (2003). In addition, Vps4 protein (i.e., for example, an ATPase) is required for the dissociation of the full ESCRT complex. Raiborg et al., “Protein sorting into multivesicular endosomes” Cuff Opin Cell Biol 15:446-55 (2003).

[0377] E. VLP Release Inhibition

[0378] Studies with a number of virus types, most prominently retroviruses, have shown that cellular proteins involved in the formation of MVBs are recruited by retrovirus gag proteins and other matrix-like proteins by interactions of viral Late Domains with a component of the VPS pathway. Demirov et al., “Retrovirus budding” Virus Res 106:87-102 (2004); Morita et al., “Retrovirus budding” Annu Rev Cell Dev Biol. 20:395-425 (2004); Pornillos et al., “Mechanisms of enveloped RNA virus budding” Trends Cell Biol. 12:569-79 (2002); 44. It has been found that dominant negative mutants of Vps4, CHMP3, and CHMP2 can block retrovirus release. Strack et al., “PIP1/ALIX is a binding partner for HIV-1p6 and EIAV p9 functioning in virus budding” Cell 114:689-699 (2003).

[0379] Although it is not necessary to understand the mechanism of an invention, it is believed that a dominant-negative mutation of Vps4 or Vps4 A-E228Q is capable of blocking M protein paramyxovirus VLP release. It is further believed that a dominant-negative mutation of CHMP3 (i.e., for example, a subunit of the ESCRT III complex) inhibits M protein paramyxovirus VLP release. These observations indicate not only that the VPS pathway is involved in paramyxoviral budding (i.e., for example, VLP release) but that it is the M protein that directly interacts with the VPS pathway.

[0380] It has recently been reported that SV5 VLP and virion release are also inhibited by expression of the dominant negative form of VSP4 implicating the VPS pathway in SV5 assembly and release. Schmitt et al., “Evidence for a new viral late-domain core sequence, FPIV, necessary for budding of a paramyxovirus” J. Virol. 79:2988-97 (2005). Furthermore, the sequence FPIV (SEQ ID NO:1) in the SV5 M protein is believed to be a Late Domain. The SV5 M protein, however, is known not to be sufficient for particle release. Schmitt et al., “Requirements for budding of paramyxovirus simian virus virus-like particles” J Virol 76:3952-64 (2002). Consequently, it is not clear how SV5 uses the VPS pathway or how this sequence might function as a Late Domain.

[0381] In one embodiment, a sequence analysis of an NDV M protein also shows the presence of an FPIV motif (SEQ ID NO:1). In one embodiment, an NDV M protein further comprises a PXXP motif (SEQ ID NO:2) and an YXXL motif (SEQ ID NO:3), sequences not found in the SV5 M protein. Other motifs identified in the art might also be candidate Late Domains for other paramyxovirus M proteins; i.e., domains that could function in budding independent of other viral proteins. Demirov et al., “Retrovirus budding” Virus Res 106:87-102 (2004); and Freed, E. O., “Viral late domains” J. Virol. 76:4679-87 (2002).

[0382] F. Host-Specific VLP Expression

[0383] Virus-like particle expression from human 293T cells have been reported in three other paramyxovirus systems (Sendai virus (SV), PIV1, and SV5) at efficiencies ranging between 18% to 70%. Schmitt et al., “Requirements for budding of paramyxovirus simian virus virus-like particles” J Virol 76:3952-64 (2002); Sugahara et al., “Paramyxovirus Sendai virus-like particle formation by expression of multiple viral proteins and acceleration of its release by C protein” Virology 325:1-10 (2004); and Takimoto et al., “Role of matrix and fusion proteins in budding of Sendai virus” J. Virol. 75: 11384-91 (2001).

[0384] In one embodiment, the present invention contemplates a method comprising improving the efficiency of paramyxovirus VLP release by using cells from the natural host of the virus. In one embodiment, a paramyxovirus is selected from the group including, but not limited to, Newcastle disease virus, measles virus, parainfluenza virus 3, or respiratory syncytial virus. In one embodiment, a M protein paramyxovirus VLP is released from avian cells with an efficiency of 90%. In another embodiment, M protein paramyxovirus VLP is released from human 293T cells with an efficiency of 50%. Furthermore, the efficiency of release of both M protein VLPs, as well as complete VLPs, from COS cells was significantly lower than release from avian cells; a difference that is not due to a lower expression level of viral proteins in COS cells versus avian cells. Although it is not necessary to understand the mechanism of an invention, it is believed that differences between the efficiencies of paramyxovirus VLP formation may be due to a host cell-specific dependency.

[0385] It is known that the protein requirements for VLP formation in other paramyxovirus systems also vary. For example, paramyxovirus systems comprising M proteins of SV, hPIV1 and SV5 are considered involved in directing virus assembly and budding, but there are differences in the role of M protein in actual particle formation. Coronel et al., “Human parainfluenza virus type 1 matrix and nucleoprotein genes transiently expressed in 12 mammalian cells induce the release of virus-like particles containing 13 nucleocapsid-like structures” J. Virol. 73:7035-8 (1999); Schmitt et al., “Requirements for budding of paramyxovirus simian virus virus-like particles” J Virol 76:3952-64 (2002); Sugahara et al., “Paramyxovirus Sendai virus-like particle formation by expression of multiple viral proteins and acceleration of its release by C protein” Virology 325:1-10 (2004); and Takimoto et al., “Role of matrix and fusion proteins in budding of Sendai virus” J. Virol. 75: 11384-91 (2001). Similar to NDV M protein, the SV and hPIV1 M proteins were sufficient for particle release, the SV5 M protein, however, was not sufficient. SV5 M protein co-expression with NP and at least one glycoprotein was required for efficient formation and release of SV5 VLPs. Schmitt et al., “Requirements for budding of paramyxovirus simian virus virus-like particles” J Virol 76:3952-64 (2002).

[0386] In one embodiment, the present invention contemplates that only M protein, and no other paramyxovirus protein, can solely direct VLP particle release. Previous studies do indicate that SV F protein may exhibit an autonomous exocytosis activity demonstrated by the release of vesicles containing the only the F protein. Sugahara et al., “Paramyxovirus Sendai virus-like particle formation by expression of multiple viral proteins and acceleration of its release by C protein” Virology 325:1-10 (2004); and Takimoto et al., “Role of matrix and fusion proteins in budding of Sendai virus” J. Virol. 75: 11384-91 (2001).

[0387] In contrast, cells contemplated by the present invention expressing the NDV F protein, alone, did not release F protein-containing material, and cells expressing HN protein, alone, released only trace amounts of very light density material HN protein containing material into the cell supernatants. These observations are similar to other reports showing that expression of SV5 F or HN glycoproteins, alone, did not result in VLP particle release. Schmitt et al., “Requirements for budding of paramyxovirus simian virus virus-like particles” J Virol 76:3952-64 (2002). Although it is not necessary to understand the mechanism of an invention, it is believed that despite observations that SV F and other enveloped negative strand virus glycoproteins have been shown to exhibit budding activity, no Late Domains have been identified in any viral glycoproteins. Schmitt et al., “Escaping from the cell: assembly and budding of negative-strand RNA viruses” Cuff Top Microbiol Immunol 283:145-96 (2004).

[0388] Embodiments of the present invention comprising co-expression of M protein and NP is also in contrast with those reported in the SV system. For example, simultaneous expression of SV M and NP is known to result in the release of VLPs containing both viral proteins. Sugahara et al., “Paramyxovirus Sendai virus-like particle formation by expression of multiple viral proteins and acceleration of its release by C protein” Virology 325:1-10 (2004).

[0389] G. Protein-Protein Interactions

[0390] The present invention contemplates using NDV as a prototype paramyxovirus in order to clarify the role of each paramyxovirus protein in particle assembly and release. Using this model, certain embodiments integrate a definition of the viral protein requirements for assembly and release of VLPs with a characterization of the protein-protein interactions in VLPs formed with different combinations of viral proteins.

Further, in some embodiments the present invention contemplates a co-localization of M protein with the viral glycoproteins in plasma membranes. Although it is not necessary to understand the mechanism of an invention, it is believed that the data presented herein show that particle assembly involves a network of specific protein-protein interactions and likely correct targeting of proteins to specific cellular domains.

[0391] In one embodiment, the present invention contemplates, VLP protein interactions form with all combinations of three and four proteins (i.e., for example, when defined by co-immunoprecipitation). In another embodiment, cell surface HN and F proteins are co-localized with M protein when expressed in different combinations with M and NP proteins. In another embodiment, co-expression of two viral proteins with M protein also significantly increased the co-localization of M protein with either HN or F proteins in the plasma membrane indicating increased interactions with M protein.

[0392] To define these protein-protein interactions, VLPs formed with different combinations of three and four proteins were solubilized with nonionic detergent and proteins precipitated with cocktails of monospecific antibodies for M, HN, or F proteins. First, each antibody cocktail precipitated all proteins from VLPs formed with M, HN, F and NP, although the efficiency of precipitation for each protein varied with the antibody specificity. Although it is not necessary to understand the mechanism of an invention, it is believed that these results are consistent with a network of interactions between all four proteins such that precipitation of one resulted in the precipitation of the other three proteins but with efficiencies that varied determined by how directly a protein was linked to the precipitated protein.

[0393] Protein-protein interactions were more clearly defined by immunoprecipitation of proteins from VLPs formed with all combinations of three proteins. These results show a specific interaction between RN and M proteins, between NP and M protein, and between F protein and NP. (See, FIG. 66). A direct interaction between F protein and M protein was not directly observed but there is likely a weak interaction between F and HN proteins, since anti-F protein antibodies precipitated HN protein from VLPs containing M, HN, and F proteins. The apparent inability for F and M proteins to interact suggest that incorporation of F protein into these VLPs may be mediated by interactions with an HN protein. Alternatively, an interaction between HN protein and NP may also facilitate incorporation processes.

[0394] Thus, when all four proteins are co-expressed, NP and HN protein are incorporated into VLPs by a direct interaction with M protein. (See, FIG. 66). Although it is not necessary to understand the mechanism of an invention, it is believed that F protein is likely incorporated indirectly due to interactions with NP and HN protein. It is further believed that an ordered complex of the four proteins is supported by a co-localization of M protein with F protein and M protein with HN protein in the plasma membrane when all four proteins are co-expressed.

[0395] However, when only F is expressed with M protein, F protein was likely not significantly incorporated into VLPs because a direct interaction between these two proteins was not observed. (See, FIG. 66). Supporting this conclusion is the observation that there was no co-localization of F and M proteins in the plasma membrane in these cells.

[0396] In spite of direct associations of M with NP, there was little NP protein incorporation into VLPs when NP and M proteins were co-expressed in the pair-wise combination. Previous reports that show that the M protein of Sendai virus is recruited in the cytoplasm by the viral nucleocapsid. Stricker et al., “The Sendai virus matrix protein appears to be recruited in the cytoplasm by the viral nucleocapsid to function in viral assembly and budding” J Gen Virol 75 (Pt 5):1031-1042 (1994). Perhaps NP causes the retargeting of M protein to this compartment. Indeed, co-expression of M protein with NP resulted in a 2.5 fold suppression of M protein containing VLP release, a result also consistent with retention of M protein in cells by NP protein.

[0397] Although co-immunoprecipitations of VLP proteins formed with M, HN, and F protein indicated a direct interaction of HN protein with M protein, there were only low levels of incorporation of HN protein into VLPs when HN and M proteins were co-expressed in a pair-wise combination. Furthermore, there was little co-localization of the two proteins in the plasma membrane. Perhaps, in the absence of other proteins, HN and M proteins show minimal co-localization in the same regions of the cell, thereby preventing their association. Alternatively, it is also possible that the conformation of the HN protein transmembrane or cytoplasmic tail may be different in the absence of expression of F protein or NP protein inhibiting association of HN protein with M protein. The 50% reduction of M protein VLPs upon co-expression of HN protein with M protein cannot be presently explained but similar results have been previously reported in Sendai virus system. Sugahara et al., “Paramyxovirus Sendai virus-like particle formation by expression of multiple viral proteins and acceleration of its release by C protein” Virology 325:1-10 (2004).

[0398] It should be realized that immunoprecipitation is not necessary to produce purified VLPs. In one embodiment, the present invention contemplates a VLP preparation comprising pure viral proteins. Protein compositions were compared between purified NDV whole virus and VLPs that have not undergone immunoprecipitation. The data show that the VLP preparation does not contain any proteins that are not present in the whole virus preparation. See, FIG. 72. Consequently, the VLPs are as pure as the whole virus.

[0399] Although it is not necessary to understand the mechanism of an invention, it is believed that VLPs formed with NP, M and F proteins are likely due to interactions between M and NP and interactions between F and NP. (See, FIG. 66). For example, F protein may relocate NP to the plasma membrane drawing M to specific domains containing F protein. Indeed, data presented herein show that addition of NP increases the co-localization of M protein with F protein in the plasma membrane. It is further believed that VLPs formed with NP, M and HN proteins likely form due to interactions of both HN protein and NP with M protein. Data presented herein show that expression of NP with HN and M proteins increase the co-localization of M and HN proteins in the plasma membrane. One possible hypothesis suggests that NP-M protein interactions alter the conformation of M thereby facilitating its interaction with HN protein. Indeed, surface RN protein in the presence of NP appears more punctuate along the cell edges.

[0400] This network of interactions proposed above could account for the conclusions that the cytoplasmic domains (CT) of the HN and F proteins have redundant functions. Schmitt et al., “Requirements for budding of paramyxovirus simian virus 5 virus-like particles” J Virol 76:3952-3964 (2002). For example, the CT domain of the F protein may target NP-M complexes to the plasma membrane by interactions with NP protein while the HN protein CT domain targets these complexes by virtue of direct interactions with M protein.

[0401] The interaction of M protein and NP suggested by the data herein is supported by studies using Sendai virus. Stricker et al., “The Sendai virus matrix protein appears to be recruited in the cytoplasm by the viral nucleocapsid to function in viral assembly and budding” J Gen Virol 75 (Pt 5):1031-1042 (1994). Further, a possible interaction of HN protein with other viral protein is consistent with numerous studies suggesting an interaction of M protein with viral glycoproteins in paramyxovirus-infected cells or in cells transfected with paramyxovirus cDNAs. Ali et al., ‘Assembly of Sendai virus: M protein interacts with F and HN proteins and with the cytoplasmic tail and transmembrane domain of F protein” Virology 276:289-303 (2000); Ghildyal et al., “Interaction between the respiratory syncytial virus G glycoprotein cytoplasmic domain and the matrix protein” J Gen Virol 86:1879-1884 (2005); Henderson et al., “Sorting of the respiratory syncytial virus matrix protein into detergent-resistant structures is dependent on cell-surface expression of the glycoproteins” Virology 300:244-254 (2002); Sanderson et al., “Sendai virus assembly: M protein binds to viral glycoproteins in transit through the secretory pathway” J Virol 67:651-663 (1993); and Yoshida et al., “Membrane (M) protein of HVJ (Sendai virus)—Its role in virus assembly” Virology 71:143-161 (1976). Indeed, it has been reported that the respiratory syncytial virus G protein specifically interacts with M protein. However, there are no previous reports of a direct interaction between F protein and NP. It is possible that interactions between viral proteins vary within paramyxoviruses and the requirements for formation of VLPs may depend upon the distribution of late domains on the viral proteins. The results presented herein are consistent with the proposal that the NDV M protein buds and releases indiscriminately from different cellular membranes in the absence of other viral proteins. Although it is not necessary to understand the mechanism of an invention, it is believed that when both glycoproteins and M proteins are present in the plasma membrane, the M protein-plasma membrane association has an improved stability. It is further believed that NP association with F and M protein may also further stabilize and organize the network of interactions within the assembling particle.

[0402] This protein-protein interacting network hypothesis has support from observations comparing electron micrographs of whole virus (B1) with VLPs formed only with M protein, and VLPs formed with NP, M, F, and HN proteins. See, FIG. 73. When all four viral proteins are present, the VLP size and shape is very similar to the whole virus. However, an M protein-only VLP size and shape is more hetergeneous when compare to the whole virus but is still remarkably similar.

[0403] In one embodiment, the present invention contemplates a VLP production system for NDV. In one embodiment, the M protein facilitates NDV VLP budding such that NDV VLP budding is virtually non-existent in the absence of M protein. In other embodiments, specific protein-protein interactions occur in VLPs involved in the ordered assembly of particles. In one embodiment, an interaction between M and HN or F and NP directs the targeting of M and NP into assembly sites within the plasma membrane.

### III. Paramyxoviral Diseases

[0404] The present invention is not limited to NDV, measles, parainfluenza virus 3, and respiratory syncytial paramyxovirus diseases. Many other paramyxoviruses diseases are also within the scope of this invention. For example, both human diseases (See Table 1) and animal diseases (See Table 2) are contemplated.

TABLE 1
Paramyxovirus-Mediated Human Diseases
Susceptible To VLP Vaccination

| | | Current |
|---|---|---|
| Virus Type | Disease Type | Vaccination |
| Parainfluenza | Acute Respiratory Infection | None |
| (1, 2, 3, and 4) | | |
| Mumps | Childhood Disease | Live Attenuated |
| | | Virus |
| Measles | Childhood Disease | Live Attenuated |
| | | Virus |
| Respiratory Syncytial | Serious Respiratory Infection | None |
| Nipah | Emerging Infection | None |
| | Acute Neurological Disease | |
| Hendra | Emerging Infection | None |
| | Acute Neurological Disease | |
| Metapneumovirus | Acute Respiratory Infection | None |

TABLE 2
Paramyxovirus-Mediated Animal Diseases
Susceptible To VLP Vaccination

| Virus Type | Animal Species |
|---|---|
| Canine Distemper | Dogs |
| Rhinderpest | Cattle |
| Pneumoviruses | Birds |

[0405] A. Newcastle Disease

[0406] Newcastle disease virus (NDV) is an avian pathogen. There are different strains of this virus that have been isolated in many regions of the world. Some strains are avirulent and are used as live attenuated vaccines. Others are virulent and cause severe systemic disease in birds with a high mortality rate. Because of the threat to the poultry industry, the United States government has classified virulent NDV strains as select agents under the Patriots Act.

[0407] Most chickens in the United States are vaccinated with an avirulent NDV strain. The current vaccine, however, is not ideal. The vaccine, a live attenuated virus, infects chickens and causes a mild respiratory disease. As a result, vaccinated birds have a lower body weight and lower egg production than unvaccinated birds. For this reason, many other countries do not vaccinate against NDV. Thus, there are periodic outbreaks of the disease in these countries forcing massive bird slaughter to contain the disease. Flocks of vaccinated chickens can also be susceptible to some NDV virulent strains. Consequently, there have been Newcastle disease virus outbreaks in the United States. For example, there was an NDV outbreak in California in 2001-2002.

[0408] What is needed is a NDV vaccine that does not have negative productivity consequences and can induce a broader range of protection than currently used vaccines.

[0409] In birds, clinical evidence of NDV includes, but is not limited to, the respiratory, neurological and gastrointestinal systems. Clinical signs suggestive of Newcastle disease, are observed mainly in young birds. Common symptoms include, but are not limited to, inability to walk or fly, walking in circles, paralysis, twisted necks, depression, and high frequency of sudden death. In mammals, symptoms of Newcastle disease may include, but are not limited to, acute conjuctivitis.

[0410] A significant problem of the currently utilized NDV vaccines is a failure to protect against all NDV strains. Currently, inactivated NDV vaccines (i.e., attenuated) are sometimes used to vaccinate flocks of birds. While eliminating the detrimental effects of a live virus vaccination, these vaccines still have the disadvantage that they do not stimulate a broad spectrum of immune responses. Further, incomplete attenuation results in a percentage of vaccinated birds contracting Newcastle disease. These vaccines are also more expensive than embodiments contemplated by the present invention due to the increased manipulation required for inactivation and the monitoring of the effectiveness of inactivation.

[0411] Another problem with currently used vaccines, either live virus or inactivated virus, is that it is difficult to distinguish between birds that have been vaccinated and those that have been infected with a wild virus. The present invention contemplates antigens incorporated into a VLP preparation comprising a sequence tag. In one embodiment, the sequence tag may be detected in vivo, thereby identifying a vaccinated animal.

[0412] B. Measles

[0413] Measles is believed to be a childhood infection characterized by fever, cough, coryza (i.e., for example, an upper respiratory tract infection or inflammation), and often conjunctivitis followed by a maculopapular rash. It has been observed that the severity of the disease varies with the strain of the virus as well as the health status of the infected children. In most children, recovery is complete. However, there is a low incidence of neurological complications of varying severity. Furthermore, malnourishment or another underlying disease can significantly increase the severity of the disease. In addition, the infection is immunosuppressive resulting in increased susceptibility of the child to other life threatening infections, particularly in a third world setting.

[0414] The currently used vaccine is a live, attenuated virus that is effective in generating a protective immune response. However, the age of immunization is problematic. Vaccination too early results in a poor antibody response due to maternal antibody. Increasing the dose to overcome this effect results in immunosuppression and increased susceptibility to other potentially life threatening infections. Vaccination at a later age places the infant at a risk of acquiring the disease prior to immunization but after the maternal antibody level declines. Thus there is a need for a vaccine that will generate an effective immune response in the face of material antibody and, more importantly, a vaccine that will not be immunosuppressive at any dosage. In one embodiment, the present invention contemplates that VLPs are a candidate for such a vaccine.

[0415] Certain embodiments of the present invention provide virus-like particles (VLPs) as a safe, broad-spectrum, and effective vaccine to protect mammals from a measles virus. Additionally, these embodiments provide systems and protocols for the large-scale, economical production of a measles VLP vaccine (i.e., for example, to be useful as a vaccine, VLP production must be easy and economical).

[0416] The present invention contemplates conditions for the generation of VLPs of a measles virus strain. In another embodiment, the VLPs comprise the same major antigens as infectious virus (but, of course, lack the complete viral genome). In another embodiment, the VLPs comprise major antigens having the same ratios as infectious virus. In one embodiment, the major antigens are selected from the group comprising nucleocapsid protein, membrane/matrix protein, hemagglutinin protein, and fusion protein.

[0417] Other embodiments of the present invention provide antigens derived from many different measles strains that may be incorporated into a single VLP preparation. A significant problem of the currently utilized measles vaccines is a failure to protect against all measles strains.

[0418] Measles is thought to be a highly contagious viral illness having primary symptoms including, but not limited to, fever, cough, conjunctivitis (i.e., redness and irritation in membranes of the eyes), and spreading rash. The viral infection may be spread by contact with droplets from the nose, mouth, or throat of an infected person. The incubation period is 8 to 12 days before symptoms generally appear.

[0419] Immunity to the disease occurs after vaccination or active infection. Currently, vaccination is limited to attenuated live virus that has a significant risk of causing measles in the vaccinated subject. Further some believe that the Measles-Mumps-Rubella vaccine can cause autism. Before widespread immunization, measles was so common during childhood that the majority of the population had been infected by age 20. Measles cases dropped over the last several decades to virtually none in the U.S. and Canada because of widespread immunization, but rates are currently on the rise. Public fear, therefore, results in lower vaccination rates that can cause outbreaks of measles, mumps, and rubella—which can be serious. One advantage of one embodiment of the present invention is that a VLP non-replicating measles vaccine carries no risk of infection. The VLP vaccine is thus expected to generate a much higher compliance rate and subsequently the measles occurrence should drop dramatically.

[0420] In one embodiment, measles symptoms include, but are not limited to, sore throat, runny nose, cough, muscle pain, fever, bloodshot eyes, tiny white spots inside the mouth (called Koplik's spots), photophobia (light sensitivity), a rash appearing around the fifth day of the disease and lasting 4-7 days that usually starts on the head and spreads to other areas, progressing downward (the rash may be a maculopapular rash appearing as both macules (flat, discolored areas) and papules (solid, red, elevated areas) that later merge together (confluent)), further the rash may itch.

[0421] There is no specific treatment of measles, though some children may require supplementation with Vitamin A. Symptoms may be relieved with bed rest, acetaminophen, and humidified air. The probable outcome is excellent in uncomplicated cases. However, pneumonia or encephalitis are possible complications.

[0422] C. Respiratory Syncytial Virus

[0423] Respiratory syncytial virus (RSV) is believed to be the single most common cause of hospitalization for respiratory infection of infants and young children worldwide. Re-infection also commonly occurs. RSV attack rates for all infant populations is estimated between 100% and 83% and an estimated 50% of these experience two or more infections during the first two years of life (reviewed in Collins, et al, Respiratory Syncytial Virus, in Fields Virology, Ed. Knipe, D. and Howley, P. Lippincott Williams and Wilkins, 2001). RSV is also increasingly recognized as a serious pathogen for the elderly.

[0424] Currently, there is no vaccine available for this pathogen. Early trials with a formalin inactivated virus preparation had the disastrous effect of enhancing the severity of disease upon exposure to the live virus. In addition, protein subunit vaccines had a similar effect in experimental animals. It is speculated that proteins in an abnormal conformation, either induced by formalin treatment or by expression and purification of individual proteins, resulted in a loss of epitopes that stimulated a protective immune response. Animal studies suggested that immunopathology was due to immune cells (reviewed in Collins, et al, Respiratory Syncytial Virus, in Fields Virology, Ed. Knipe, D. and Howley, P. Lippincott Williams and Wilkins, 2001. VLPs formed with RSV proteins will likely incorporate viral proteins in their native conformation. These immunogens have the potential to stimulate a protective immune response and to avoid the adverse effects of unfolded proteins.

[0425] Certain embodiments of the present invention provide virus-like particles (VLPs) as a safe, broad-spectrum, and effective vaccine to protect mammals from Respiratory Syncytial Virus (RSV). Additionally, these embodiments provide systems and protocols for the large-scale, economical production of RSV VLP vaccines (i.e., for example, to be useful as a vaccine, VLP production must be easy and economical).

[0426] The present invention contemplates conditions for the efficient generation of VLPs of a virulent RSV strain. In another embodiment, the VLPs comprise the same major antigens as infectious virus. In another embodiment, the VLPs comprise major antigens having the same ratios as infectious virus. In one embodiment, the major antigens are selected from the group comprising nucleocapsid protein, membrane/matrix protein, G or attachment protein, and fusion protein.

[0427] Other embodiments of the present invention provide antigens derived from many different RSV strains that may be incorporated into a single VLP preparation. A significant problem of the currently utilized RSV vaccines is a failure to protect against all RSV strains.

[0428] Respiratory syncytial virus (RSV) is believed to be a very common virus that causes mild cold-like symptoms in adults and older healthy children. RSV may cause serious respiratory infections in young babies, especially those born prematurely, who have heart or lung disease, or who are immunocompromised.

[0429] RSV is believed to be the most common respiratory pathogen in infants and young children. Specifically, RSV is believe to infect nearly all infants by the age of two years. Seasonal outbreaks of acute respiratory illness occur each year, on a schedule that is somewhat predictable in each region. The season typically begins in the fall and runs into the spring.

[0430] RSV may be spread easily by physical contact including, but not limited to, touching, kissing, and shaking hands with an infected subject. Although it is not necessary to understand the mechanism of an invention, it is believed that RSV transmission is usually by contact with contaminated secretions, which may involve tiny droplets or objects that droplets have touched. RSV can live for half an hour or more on the skin surface. It is also believed that RSV can also live up to five hours on countertops and for several hours on used tissues, consequently, RSV often spreads very rapidly in crowded households and day care centers.

[0431] In one embodiment, the present invention contemplates a VLP RSV vaccine that prevents the development of infant and young adult diseases such as, but not limited to, pneumonia, bronchiolitis (inflammation of the small airways of the lungs), and tracheobronchitis (croup). In one embodiment, the present invention contemplates a VLP RSV vaccine that prevents the development of a mild respiratory illness in healthy adults and older children.

[0432] The lack of a safe and effective RSV vaccine poses a significant public safety and health risk. For example, it is believed that each year up to 125,000 infants are hospitalized due to severe RSV disease; and about 1-2% of these infants die. Further, infants that are: i) born prematurely; ii) suffering chronic lung disease; iii) immunocompromised; or iv) afflicted with certain forms of heart disease are at increased risk for severe RSV disease. Even adults who are exposed to tobacco smoke, attend daycare, live in crowded conditions, or have school-age siblings are also at higher risk of contracting RSV.

[0433] In one embodiment, the present invention contemplates RSV symptoms including, but not limited to, nasal congestion, nasal flaring, cough, rapid breathing (tachypnea), breathing difficulty or labored breathing, shortness of breath, cyanosis (bluish discoloration of skin caused by lack of oxygen), wheezing, fever, or croupy cough (often described as a “seal bark” cough). It should be recognized that symptoms are variable and differ with age. For example, infants less than one year old are most severely affected and often have the most trouble breathing. Conversely, older children usually have only mild, cold-like symptoms. In general, symptoms usually appear 4-6 days after exposure.

[0434] Because there is no known treatment for an active RSV infection, those in the art have considered preventative drugs. For example, Synagis® (palivizumab) has been approved for prevention of RSV disease in children younger than 24 months of age who are at high risk for serious RSV disease. Synagis® however, must be prescribed and given as a monthly shot to provide complete protection.

[0435] D. Parainfluenza 3 (PIV 3)

[0436] PIV3 is believed to be a common cause of respiratory disease (rhinitis, pharyngitis, laryngitis, bronchiolitis, and pneumonia). This virus is the second most common cause of respiratory infection in hospitalized pediatric patients. No vaccines are available for PIV 3. A number of different approaches to vaccination have been considered but none has resulted in a licensed vaccine. (reviewed in Chanock, et al, Parainfluenza Viruses, in Fields Virology, Ed. Knipe, D. and Howley, P. Lippincott Williams and Wilkins, 2001).

[0437] Physiologically, PIV 3 usually infects the upper and lower respiratory systems. Currently, five serotypes of Parainfluenza virus are known (1, 2, 3, 4a, and 4b), all of which are associated with causing disease. Children are believed highly susceptible to Parainfluenza and may be responsible for approximately 40 percent to 50 percent of all cases of croup, and 10 percent to 15 percent of bronchiolitis and bronchitis and some pneumonias. In the general population, the incidence of parainfluenza is unknown but suspected to be very high. Illness causing only a runny nose and cold-like symptoms may pass as a simple cold rather than parainfluenza. Risk factors include young age. By school age most children have been exposed to parainfluenza virus. Most adults have antibodies against parainfluenza although they can get repeat infections.

[0438] Laryngotracheobronchitis (i.e., for example, croup) is believed to be a common clinical manifestation of parainfluenza virus infection. Parainfluenza viruses are found uncommonly associated with other respiratory tract infections in children such as tracheobronchitis, bronchiolitis, and bronchopneumonia. Occasionally, a mild non-specific illness is seen after parainfluenza virus infection. Parainfluenza viruses produce disease throughout the year, but peak prevalence rates occur during wintertime outbreaks of respiratory tract infections, especially croup, in children throughout the temperate zones of the northern and southern hemispheres. Parainfluenza virus infections are primarily childhood diseases, the highest age-specific attack rates for croup occur in children below the age of 3 years. Serotype 3 infections occur earliest and most frequently, so that 50% of children in the US are infected during the first year of life and almost all by 6 years, as determined by seroepidemiological studies.

[0439] Parainfluenza viruses generally enters a host through the inhalation of infected droplet nuclei. Virus multiplication occurs throughout the tracheobronchial tree, inducing the production of mucus. The vocal cords of the larynx become grossly swollen, causing obstruction to the inflow of air, which is manifested by inspiratory stridor. In adults, the virus is usually limited to causing inflammation in the upper parts of the respiratory tract. In infants and young children, the bronchi, bronchioles and lungs are occasionally involved, which may reflect on the small size of the airways and the relative immunological immaturity. Viraemia is neither an essential nor a common phase of infection.

[0440] Typically, children may exhibit a croupy cough, inspiratory stridor, hoarse voice or cry and respiratory difficulty on inspiration, and are usually afebrile. About 80% of patients exhibit a cough and runny nose 1 to 3 days before the onset of the cough. Respiratory rhonchi are heard frequently throughout the lung fields. Radiological examination is usually normal. Occasionally the epiglottitis is grossly swollen and reddened. Severe airway obstruction may ensue, necessitating an emergency tracheotomy.

### IV. VLP Vaccines

[0441] Paramyxovirus VLP vaccines are novel in the art. While virosome vaccines are known, these vaccines require disrupting a purified virus, extracting the genome, and reassembling particles with the viral proteins and lipids to form lipid particles containing viral proteins. This approach is very costly. Also, since the starting material is live virus, there is a danger of contaminating the vaccine with live virus. In addition, the resulting vaccine is likely not a broad-spectrum vaccine. Furthermore, the immune response to this vaccine cannot be distinguished from a virus infection.

[0442] Paramyxovirus VLPs are believed to be a highly effective type of subunit vaccine that mimics the overall virus structure without containing genetic material that results in host cell infection. For example, a virus-like particle may completely lack the DNA or RNA genome while maintaining the authentic conformation of viral capsid proteins. Consequently, the VLP is non-infectious. Further, a virus-like particle comprising viral capsid proteins may undergo spontaneous self-assembly similar to authentic viruses. It is known, however, that polyomavirus VLP preparations are among the least developed in the art. Noad et al., “Virus-like particles as immunogens” Trends Microbiol 11:438-444 (2003).

[0443] In one embodiment, the present invention contemplates a vaccine comprising a paramyxovirus VLP. In one embodiment, the paramyxovirus is selected from the group including, but not limited to, Newcastle disease, measles, parainfluenza virus 3, or respiratory syncytial virus. In one embodiment, the VLP comprises an M protein. In another embodiment, the VLP further comprises at least two glycoproteins. In one embodiment, the glycoproteins are selected from the group consisting of F protein and HN protein.

[0444] A. Newcastle Disease Virus

[0445] Certain embodiments of the present invention provide virus-like particles (VLPs) as a safe, broad-spectrum, and effective vaccine to protect poultry from Newcastle disease virus. Additionally, these embodiments provide systems and protocols for the large-scale, economical production of VLPs (i.e., for example, to be useful as a vaccine, VLP production must be easy and economical).

[0446] A silver stain comparision of whole virus (B1) grown in eggs are compared to VLPs grown in large scale tissue culture demonstrates that VLPs may be produced in microgram quantities (i.e., sufficient for immunogenicity testing in mice). See, FIG. 74. VLPs have been rapidly purified from large amounts of media to faciliate large scale VLP production techniques. See, Table 3.

TABLE 3
Large Scale VLP Preparations

| | | | total | Total |
|---|---|---|---|---|
| Particle | | ng/μl | volume | protein(μg) |
| B1 | HN | 23.05 | 1 ml | 23.05 |
| virus | F | 11.09 | | 11.09 |
| | NP | 100.32 | | 100.09 |
| | M | 75.08 | | 75.08 |
| | | | | 209.54 total |
| VLP | HN | 177.35 | 1.1 ml | 195.08 |
| prep1 | F | 349.56 | | 384.52 |
| | NP | 140.19 | | 154.21 |
| | M | 72.02 | | 79.22 |
| | | | | 813.04 total |
| VLP | HN | 109.70 | 0.5 ml | 54.85 |
| prep2 | F | 85.42 | | 42.71 |
| | NP | 98.24 | | 49.71 |
| | M | 63.50 | | 31.75 |
| | | | | 178.43 total |
| VLP | HN | 92.55 | 0.2 ml | 18.4 |
| prep 3 | F | 53.54 | | 10.70 |
| | NP | 92.13 | | 18.26 |
| | M | 60.89 | | 12.18 |
| | | | | 59.54 total |

[0447] Preparation 1 was contaiminated with albumin, which co-migrates with F protein. Therefore, the amounts of F in Preparation 1 appear enhanced when compared to NP. This albumin contamination was successfully eliminated in Preparations 2 & 3

[0448] Although it is not necessary to understand the mechanism of an invention, it is believed that virus (B1) grown in eggs (as is standard in the art) are deficient in the HN and F glycoproteins (typical of avirulent (AV) virus particles), unlike the presently disclosed VLP production methods in which virus (AV) VLP comprise HN and F glycoproteins. In one embodiment, the present invention contemplates an improved vaccine comprising an NVD VLP comprising HN and F glycoproteins.

[0449] NDV subunit protein expression has been reported in the art. For example, electron microscopic examination of negatively stained extracellular fluids (ECF) from Spodoptera frugiperda cell cultures infected with a recombinant baculovirus expressing the Newcastle disease virus (NDV) haemagglutinin-neuraminidase (HN) revealed NDV-like envelopes which resembled the envelopes of authentic NDV. Immunogold staining with anti-NDV HN monoclonal antibodies demonstrated HN antigen in spikes on the NDV-like envelopes. The ECF from the recombinant-infected cultures also contained baculovirus particles which resembled standard baculovirus particles except that some showed polar protrusions of the envelope. Unlike the embodiments contemplated in the present invention, it was concluded that NDV HN, in the absence of the matrix protein (i.e., M protein), might be able to initiate and control the production of viral envelopes which are morphologically identical to those of authentic NDV. Nagy et al., “Synthesis of Newcastle disease virus (NDV)-like envelopes in insect cells infected with a recombinant baculovirus expressing the haemagglutinin-neuraminidase of NDV” J Gen Virol. 72:753-756 (1991).

[0450] In one embodiment, the present invention contemplates a method comprising a commercially usable NDV VLP vaccine. In one embodiment, producing a NDV VLP vaccine is economical and efficient. In another embodiment, immunization with an NDV VLP vaccine stimulates production of a broad spectrum of protective antibodies. In one embodiment, an avian cell line continuously expresses at least four NDV glycoproteins

[0451] In one embodiment, the present invention contemplates a method producing NDV VLP vaccines in a transient expression system. In one embodiment, the system comprises avian cells transfected with nucleic acid (e.g., in plasmids, expression vectors, etc) encoding at least one NDV viral glycoprotein. In one embodiment, the system comprises an avian cell line with select viral genes as part of the avian cell chromosome, wherein the incorporated viral gene continually releases NDV VLP particles useful for vaccines. In one embodiment, the viral gene comprises a viral glycoprotein. In one embodiment, the viral glycoprotein is selected from the group comprising NP protein, M protein, F-K115Q protein, or HN protein.

[0452] In one embodiment, the present invention contemplates a method of generating VLPs comprising antigens for many different NDV strains of NDV. Although it is not necessary to understand the mechanism of an invention, it is believed that an integrated NDV vaccine confers a broader protection range than that generated by current vaccines. In one embodiment, the present invention contemplates an VLP vaccine expression system comprising a first cDNA encoding a first viral protein gene from a first strain; a second cDNA encoding a second viral protein gene from a second strain; and a third cDNA encoding a third viral protein gene from a third strain. In one embodiment, the first viral protein gene is selected from the group comprising HN protein, F protein, NP protein or M protein. In one embodiment, the first strain is selected from the group comprising strain Hertz, strain AV, or strain B1. In one embodiment, the second viral protein gene is selected from the group comprising HN protein, F protein, NP protein or M protein. In one embodiment, the second strain is selected from the group comprising strain Hertz, strain AV, or strain B1. In one embodiment, the third viral protein gene is selected from the group comprising HN protein, F protein, NP protein or M protein. In one embodiment, the third strain is selected from the group comprising strain Hertz, strain AV, or strain B1. In one embodiment, the present invention contemplates a method for detecting a viral protein gene incorporated into a VLP vaccine comprising contacting the viral protein gene with strain specific antibodies or incorporated sequence tags.

[0453] In one embodiment, the present invention contemplates a method comprising a baculovirus expression system producing NDV VLP vaccines. Although it is not necessary to understand the mechanism of an invention, it is believed that baculovirus expression systems are capable the highest levels of expression of a protein of all expression systems available. In one embodiment, a baculovirus expression system produces milligrams of VLP vaccine. In one embodiment, a baculovirus expression vector encodes an NDV VLP vaccine. In one embodiment, an insect cell is transfected with a baculovirus expression system encoding an NDV VLP vaccine. In one embodiment, a baculovirus vector comprises at least four NDV structural proteins. For a VLP to be a realistic vaccine candidate, it needs to be produced in a safe expression system that is amenable to large-scale production. An insect-ceil-based protein production system has many advantages for VLP production. The first is that large amounts of recombinant proteins can be produced in high-density cell culture conditions in eukaryotic cells, resulting in high recovery of correctly folded antigen. Second, as the insect cells used for vaccine production can be cultured without mammalian-cell-derived supplements, the risk of culturing opportunistic pathogens is minimized. Third, the baculovirus used for recombinant protein expression has a narrow host range that includes only a few species of Lepidoptera, and therefore represents no threat to vaccinated individuals. Fourth, baculovirus is easily inactivated by simple chemical treatment, and is localized mainly in the nucleus and culture media of insect cell preparations, whereas most VLPs are purified from cytoplasmic extracts. Finally, the baculovirus system can be scaled-up for large-scale vaccine production.

[0454] B. Measles

[0455] In one embodiment, the present invention contemplates a measles vaccine comprising a measles virus like particle, wherein said particle comprises a measles matrix protein. In one embodiment, the vaccine further comprises at least two measles glycoproteins.

[0456] The use of VLP vaccines have been proposed for the measles paramyxovirus virus, but only retrovirus HIV VLP production was demonstrated in yeast cells. Morikawa Y., “Virus-like micrograms and process of producing the same” United States Patent Application Publ. No. 20040009193 (2004). This proposed technique is limited to VLP expression in eukaryotic bacterial cells and does not suggest either baculovirus or mammalian cell culture techniques. Further, there is no showing that these eukaryotic VLP vaccines are, in fact, safe and effective. More importantly, Morikawa's VLP measles vaccines relies upon type IV budding as described by Garoff et al., supra. Some embodiments described herein clearly demonstrate that the ribonucleic acid core is not required for paramyxovirus budding; as Garoff et al. teaches.

[0457] Another approach suggested as useful for the development of a paramyxovirus measles vaccine involves gene therapy techniques by administering a DNA vaccine. Robinson et al., “Compositions and methods for generating an immune response” United States Patent Application Publ No. 20040105871 (2004). This technique has been demonstrated by the stable transfection of a host genome with an expression cassette comprising an HIV DNA VLP vaccine. See also, Mazzara et al., “Self assembled, defective, nonself-propagating viral particles” U.S. Pat. No. 5,804,196 (1998) (herein incorporated by reference). An alternative gene therapy approach suggests incorporating live attenuated measles virus into an expression vector to produce a vaccine, either in vivo or in vitro. VLPs, however, are not contemplated for measles virus vaccines. Herold J., “SARS-coronavirus virus-like particles and methods of use” United States Patent Application Publ. No. 20050002953 (2005).

[0458] C. Respiratory Syncytial Virus

[0459] In one embodiment, the present invention contemplates a respiratory syncytial virus vaccine comprising a respiratory syncytial virus like particle, wherein said particle comprises a respiratory syncytial virus matrix protein. In one embodiment, the vaccine further comprises at least two respiratory syncytial virus glycoproteins.

[0460] VLPs have been disclosed for the production and use of HIV-related vaccines. In passing, it is suggested that many other virus (i.e., respiratory syncytial virus and measles virus) might also be compatible with the disclosed technology. No detail, however, is presented to support these speculations. Barnett et al., Expression of HIV polypeptides and production of virus-like particles” U.S. Pat. No. 6,602,705 (2003).

[0461] It has also been suggested that it might be possible to produce respiratory syncytial virus VLP vaccines in a manner identical to Bluetongue VLPs comprising the VP3, VP7, VP2, and VP5 genes. Ermak et al., “Oral immunization with multiple particulate antigen delivery system” U.S. Pat. No. 5,690,938 (1997) (herein incorporated by reference). Aside from this brief mention, Ermak does not provide any technical information regarding paramyxoviruses, and is limited to the Orbivirus genus (Reoviridae family).

[0462] In vivo mouse cytotoxic lymphocyte responses (i.e., an immunization response) are hypothesized to occur following exposure to recombinant HIV-1-IIIB gp160 envelope glycoprotein complexed to microspheres and administered as a vaccine. Rock, K. L., “Compositions and methods for inducing cytotoxic T lymphocyte responses by immunization with protein antigens” U.S. Pat. No. 6,328,972 (2001). Rock suggests that VLPs having antigens to either respiratory syncytial virus or measles virus might also stimulate these cytotoxic lymphocytes to generate an immune response. There is, however, no discussion, of any technical details or expectations of success regarding this approach. In fact, Rock does not show any data relevant to VLP vaccines for any antigen.

[0463] D. Parainfluenza 3 Virus

[0464] In one embodiment, the present invention contemplates a parainfluenza 3 virus vaccine comprising a parainfluenza 3 virus like particle, wherein said particle comprises a parainfluenza 3 virus matrix protein. In one embodiment, the vaccine further comprises at least two parainfluenza 3 glycoproteins.

[0465] E. Enhancement of VLP Vaccines

[0466] Vaccine or treatment compositions of the invention may be administered parenterally, by injection, for example, either subcutaneously or intramuscularly. Additional formulations which are suitable for other modes of administration include suppositories, and in some cases, oral formulations or formulations suitable for distribution as aerosols. Oral formulations include such normally employed excipients as, for example, pharmaceutical grades of mannitol, lactose, starch magnesium stearate, sodium saccharine, cellulose, magnesium carbonate, and the like. These compositions take the form of solutions, suspensions, tablets, pills, capsules, sustained release formulations or powders and contain 10%-95% of active ingredient, preferably 25-70%.

[0467] In the case of the oral formulations, the manipulation of T-cell subsets employing adjuvants, antigen packaging, or the addition of individual cytokines to various formulation can result in improved oral vaccines with optimized immune responses.

[0468] 1. Adjuvants

[0469] The present invention further contemplates immunization with or without adjuvant. In one embodiment, the present invention contemplates a co-administration of a paramxyovirus VLP vaccine and an adjuvant, wherein the resultant immune response is enhanced. If adjuvant is used, it is not intended that the present invention be limited to any particular type of adjuvant—or that the same adjuvant, once used, be used all the time. While the present invention contemplates all types of adjuvant, whether used separately or in combinations, the preferred use of adjuvant is the use of Complete Freund's Adjuvant followed sometime later with Incomplete Freund's Adjuvant. Another preferred use of adjuvant is the use of Gerbu adjuvant (GMDP; C.C. Biotech Corp.). The invention also contemplates the use of RIBI fowl adjuvant (MPL; RIBI Immunochemical Research, Inc.). Other adjuvants include, but are not limited to, potassium alum, aluminum phosphate, aluminum hydroxide, QS21 (Cambridge Biotech), Titer Max adjuvant (CytRx), or Quil A adjuvant.

[0470] 2. Cytokines

[0471] In one embodiment, the present invention contemplates a co-administration of a paramxyovirus VLP vaccine and a cytokine, wherein the resultant immune response is enhanced. Although it is not necessary to understand the mechanism of an invention, it is believed that cytokines may modulate proliferation, growth, and differentiation of hematopoietic stem cells that ultimately produce vaccine related antibodies. In one embodiment, a cytokine may be selected from the group comprising interleukin-12 (IL-12), granulocyte-macrophage colony-stimulating factor (GM-CSF), interleukin-6 (IL-6), interleukin-18 (IL-18), alpha, beta, or gamma-interferon (α,β,γ-IFN) or chemokines. Especially preferred cytokines include IL-12 and GM-CSF. The cytokines can be used in various combinations to fine-tune the response of an animal's immune system, including both antibody and cytotoxic T lymphocyte responses, to bring out the specific level of response needed to control or eliminate a paramyxovirus infection.

### V. VLP Vaccine Expression Systems

[0472] In one embodiment, the present invention contemplates methods to produce VLP vaccines economically and at high production rates. In one embodiment, the present invention contemplates a method comprising transfecting a cell culture with a nucleic acid expression vector comprising a paramyxovirus VLP vaccine cassette. In one embodiment, the cell culture comprises avian cells (i.e., for example, ELL-0 cells). In one embodiment, the cell culture comprises a virus (i.e., for example, baculovirus).

[0473] Other cells that are useful for expression of the invention's vectors include, without limitation, avian cells, insect cells and mammalian cells. In one embodiment, the cells are in vitro.

[0474] In one embodiment the avian cell is an ELL-0 cell (East Lansing Strain of Chicken embryo fibroblast), such as that used in Examples 29-33 and 36-37. Insect cells are exemplified by Trichoplusia ni (Tn5) cells and SF9 cells. In a further embodiment, the mammalian cell may be a Chinese hamster ovary CHO-K1 cells (ATCC CCl-61), bovine mammary epithelial cells (ATCC CRL 10274), monkey kidney CV1 line transformed by SV40 (COS-7, ATCC CRL 1651), (293 or 293 cells subcloned for growth in suspension culture; see, e.g., Graham et al., J. Gen Virol., 36:59 (1977)), baby hamster kidney cells (BHK, ATCC CCL 10), mouse sertoli cells (TM4, Mather, Biol. Reprod. 23:243-251 (1980)), monkey kidney cells (CV1 ATCC CCL 70), African green monkey kidney cells (VERO-76, ATCC CRL-1587), human cervical carcinoma cells (HELA, ATCC CCL 2), canine kidney cells (MDCK, ATCC CCL 34), buffalo rat liver cells (BRL 3A, ATCC CRL 1442), human lung cells (W138, ATCC CCL 75), human liver cells (Hep G2, HB 8065), mouse mammary tumor cells (MMT 060562, ATCC CCL51); TRI cells (Mather et al., Annals N.Y. Acad. Sci., 383:44-68 (1982)), MRC 5 cells, FS4 cells, rat fibroblast cells (208F), and MDBK cells (bovine kidney cells).

[0475] A. Avian Continuous Cell Culture Expression Systems

[0476] In one embodiment, the present invention contemplates a method comprising expressing paramyxoviral proteins using an avian cell culture (i.e., for example, ELL-0 cell culture). In one embodiment, the cell culture continuously expresses the proteins. In one embodiment, the paramyxoviral proteins are selected from the group including, but not limited to, Newcastle disease viral protein, measles virus proteins, parainfluenza virus 3, or respiratory syncytial virus proteins. In one embodiment, the paramyxoviral proteins are selected from the group including, but not limited to, matrix (M) proteins, nucleocapsid (NP) proteins, fusion (F) proteins, or heamagglutinin-neuraminidase (NM) proteins (and combinations thereof).

[0477] To generate avian cell lines expressing paramyxoviral proteins, it is useful to integrate the viral genes into an avian cell chromosome. The use of retrovirus vectors is a useful approach to accomplish this integration. Avian cells can be infected with a retrovirus containing a paramyxovirus gene and, as part of the retrovirus replication cycle, the retrovirus genome with the paramyxovirus gene will integrate into the cell chromosome. Four avian cell lines will be made: i) avian cells expressing M, NP, F, and HN proteins; ii) avian cells expressing M, NP, and F; iii) avian cells expressing M, NP, and HN proteins; and iv) avian cells expressing M, HN, and F proteins.

[0478] The retrovirus vector may be constructed such that the vector is unable to direct the formation of new, progeny retroviruses in the avian cells (i.e., non-replicability). The general approach for such studies is as follows. The paramyxovirus genes are cloned into a vector with the retrovirus ends (LTRs) and the packaging signal. This vector is, however, replication incompetent due to the lack of essential genes for that process (i.e., for example, gag or pol).

[0479] The vector DNA is transfected into a packaging cell line (i.e., for example, GP-293), a cell line expressing the retroviral structural proteins; gag, pol, and env. Also transfected with the vector is another DNA encoding the vesicular stomatitis virus (VSV) G protein (i.e., for example, pVSV-G). These cells then replicate retrovirus vectors and package the vector RNAs in an envelope with the env protein as well as the VSV-G protein (called a pseudotype). These cells release particles, which are then purified and used to infect avian cells. The presence of the VSV-G protein allows these particles to initiate infection in the avian cells and expands the host range of the retrovirus.

[0480] Following transfection, the vector RNA is converted to DNA, which is then integrated into the avian cell chromosome. Because the avian cells are not expressing gag or pol, the retrovirus infection does not proceed and no progeny virus are released. The transfected avian cells thus continuously express the integrated paramyxoviral genes, but not retrovirus genes.

[0481] This protocol will be repeated to sequentially integrate each of the four paramyxovirus proteins. Cell lines will be characterized for expression of the paramyxovirus genes and the release of VLPs from these cell lines will be verified.

[0482] Vectors and packaging cell lines (pantropic retrovirus expression system) to accomplish these steps are available from Clontech (BD Biosciences Clontech). In addition, there is available a vector (Q vector) which is engineered so that transcription of the target gene is driven by an internal promoter once the expression cassette is integrated into the avian cell genome. The Q vectors reduce the likelihood that cellular sequences located adjacent to the vector integration site will interfere with the expression of the paramyxovirus genes or that these sequences are abnormally expressed due to proximity with the retroviral LTR.

[0483] B. Baculovirus Expression Systems

[0484] In one embodiment, the present invention may be practiced using the BacVector® system (Novagen). This system uses the baculovirus Autographa californica nuclear polyhedrosis virus (AcNPV) containing inserted genes to express proteins in an insect cell line (i.e., for example, Sf9). See FIG. 30. The present invention is not limited to one method of integrating target genes in to the AcNPV genome. Numerous different transfer plasmids may be used. For example, by co-transfecting cells with AcNPV DNA and the transfer plasmid, viruses can be isolated to have the genes inserted into the virus genome by homologous recombination (i.e., for example, using BacVector® Triple Cut Virus DNA, Novagen). See FIG. 28. In one embodiment, target genes (i.e., for example, NDV, measles, parainfluenza virus 3, or respiratory syncytial viral particle proteins) maybe cloned into a pBAC transfer plasmid to produce recombinant baculovirus vectors. In one embodiment, the recombination may comprise a ligation-independent cloning (LIC) technique. See FIG. 29. For example, a LIC transfer plasmid pBAC/pBACgus-2 cp may encode an upstream His-Tag and S-Tag peptide having an enterokinase (ek) cleavage site. The recombination is facilitated by primer sequences comprising: sense strand, 5′ to ATG: GACGACGACAAG (SEQ ID NO:89); antisense strand, 5′ to TTA: GAGGAGAAGCCCGG (SEQ ID NO:90).

[0485] Upon transfection, the BacVector® DNA will not produce virus unless there is a recombination event between the virus DNA and the transfer plasmid; i.e., a recombination that repairs the circular viral DNA required for replication. In one embodiment, the transfer plasmid comprises pBAC4x-1 (Novagen). See FIG. 31. Although it is not necessary to understand the mechanism of an invention, it is believed that pBAC4x-1 is constructed such that up to four (4) genes can be inserted into a single plasmid and, therefore, a single AcNPV. It is also believed that each gene is expressed using either the polh or the p10 promoters; promoters that can result in very high levels of protein expression from 24-72 hours post-infection. The pBAC4x-1 transfer vector was designed for expression of multi-subunit protein complexes and is capable of expressing the NDV M, NP, HN, and F genes either singly or in any combination.

[0486] Subsequent to co-transformation using a transfer plasmid and virus DNA, the infected cells (i.e., for example, Sf9) form plaques and express virus particles. These plaques are then isolated, wherein the expressed virus particles are purified and characterized for inserted protein gene expression. In one embodiment, the present invention contemplates an infected cell expressing virus particles comprising NDV, measles, parainfluenza virus 3, or respiratory syncytial protein genes, wherein the cell was transformed with baculovirus transfer plasmid. In one embodiment, the expression is characterized for optimal conditions, and times of expression, to support large-scale VLP preparation.

[0487] AcNPV-infected cells are known to produce extremely high quantities of the major very late gene products; polyhedrin (polh) and p10; 40-50% of the total cellular protein consists of these two gene products by the end of the infection cycle. Very late in infection (i.e., occurring after the budding and release phase), in both insects and in tissue culture, a large majority of the cell's transcriptional activity is dedicated to the polh and p10 promoters, which makes them ideal for use to drive the high-level expression of introduced target genes that replace these viral genes. Yields of up to 100 mg target protein per 10⁹ cells can be obtained.

[0488] The convenience of baculoviral expression systems has improved by developing viruses having Bsu36 I restriction sites positioned within an essential gene (i.e., for example, ORF 1629) downstream of the AcNPV polyhedrin gene and in the upstream ORF 603. such that digestion releases a fragment containing a sequence necessary for virus growth. Kitts et al., BioTechniques 14:810-817 (1993). When insect cells are co-transfected with an appropriate recombinant transfer plasmid and Bsu36 I-cut virus DNA, the necessary ORF 1629 sequence is supplied by the transfer plasmid through homologous recombination. The vast majority of the progeny viruses derived from these co-transfections contain the repaired virus with the target gene, thus minimizing the need to screen and multiply plaque purify recombinants. Alternatively, other baculoviral expression systems utilize other essential genes. For example, the progenitor BacVector-1000® and BacVector-2000® viruses from which the high efficiency BacVector-1000 and -2000 Triple Cut Virus DNAs® are prepared for cotransfections have the lacZ gene (β-galactosidase) in lieu of AcNPV polyhedrin gene. These lacZ-negative recombinants can be distinguished easily from any residual parental viruses, which are visualized as blue plaques when stained with X-Gal.

[0489] LacZ recombinants form clear plaques on staining with X-Gal, since the target gene replaces lacZ when the transfer plasmid recombines with the viral genome. A third Bsu36 I site within the lacZ gene further reduces the likelihood of reforming the parental virus. In practice and under optimal conditions, the commercially available baculovirus transfection technology produces plaques that are approximately >95% recombinant.

[0490] The recent elucidation of the complete sequence of the 133,894 bp AcNPV genome has revealed a total of some 154 potential genes. See FIG. 30. A large number of these genes are unnecessary for growth of the virus in tissue culture. These non-essential genes are known to compete with target genes for cellular resources and can be deleterious to the expression of some gene products. It is preferable to use a baculovirus expression system wherein competing non-essential genes have been deleted.

[0491] In one embodiment, the present invention contemplates using pBAC transfer plasmids designed for the expression of target proteins (i.e., for example, NDV, measles, parainfluenza virus 3, or respiratory syncytial viral proteins). Several potential pBAC transfer plasmids are shown in FIG. 31. For example, two vector backbones (shown at the top) differ only by the presence of the reporter β-glucuronidase (gus) gene driven by the p6.9 promoter (i.e., for example, the pBACgus series). Because the gus gene and P6.9 are carried with the target gene into the baculovirus genome, recombinants produce β-glucuronidase and can be identified by staining with X-gluc. The corresponding transfer plasmids lacking the gus indicator gene are about 2 kbp smaller in size and may produce higher cloning efficiencies with some large inserts.

[0492] Additionally, LIC vectors including, but not limited to, pBAC-2 cp and pBACgus-2 cp plasmids are ready for annealing with appropriately prepared inserts. See FIG. 31. In practice, a target sequence is generated by PCR using primers extended with defined sequences. See FIG. 29. For example, vector compatible cohesive ends (13 and 14 bp on the N- and C-terminal coding sequences, respectively) are produced by treatment with T4 DNA polymerase in the presence of dATP. The 3′-5′ exonuclease activity of the enzyme digests one strand of the duplex until a dT residue is encountered in the complementary strand, whereupon the available dA is added by the polymerase activity. Aslanidis et al., Nucleic Acids Res. 18:6069-6074 (1990). The treated insert and pBAC LIC transfer plasmid are briefly annealed, and the mixture transformed into NovaBlue Competent Cells.

[0493] The prepared vectors allow fusion of target genes at the most desirable position relative to the enterokinase cleavage site following the His-Tag and S-Tag fusion sequences. Inserts may be placed such that vector-encoded sequences can be completely removed by enterokinase cleavage. See FIG. 29. In addition, the configuration of restriction sites in the multiple cloning region allows direct subcloning of inserts from many pET bacterial vectors into pBAC-1 or -2 series plasmids. The His-Tag sequence may be incorporated into, for example, the pBAC-1 or -2 vectors and encodes a consecutive stretch of 6 histidines. Alternatively, a S-Tag sequence encodes a 15 AA domain of ribonuclease A, which has a strong affinity for the 104 AA S-protein. Richards et al., In: The Enzymes, Vol. IV (Boyer, P. D., Ed.), pp. 647-806, Academic Press, New York (1971). This highly specific protein-protein interaction forms the basis for sensitive detection of fusion proteins with S-protein-reporter molecule conjugates. Chemiluminescent detection of S-Tag fusion proteins may be observed using an S-protein HRP conjugate and SuperSignal™ CL-HRP substrate. (S-Tag Rapid Assay Kit, Novagen).

[0494] The pBAC4x vectors are designed for coexpression of up to 4 genes in the same cell. These vectors are extremely useful for expression of multisubunit proteins, multiple copies of a gene, multiprotein complexes, and for studies of protein-protein interactions. Weyer et al., J. Gen. Virol. 72:2967-2974 (1991); Belyaev et al.,Nucleic Acids Res. 21:1219-1223 (1993); and Belyaev et al., Gene 156:229-233 (1995).

[0495] It is known that baculoviral expression technology may be developed into an eukaryotic virus display system. Boublik et al., Bio/Technology 13:1079-1084 (1995). By appropriately engineering the AcNPV major surface glycoprotein (i.e., for example, gp64) functional proteins, including glycoproteins, can be expressed on the virus surface. A pBACsurf-1 transfer plasmid may be designed for in-frame insertion of target genes between the gp64 signal sequence and the mature protein coding sequence, under the control of the polh promoter. See FIG. 31. With this system, it is possible to construct and screen virus libraries of complex proteins for desired functional characteristics.

[0496] In one embodiment, the present invention contemplates using baculovirus expression technology to infect an Sf9 insect cell culture to express NDV, measles, parainfluenza virus 3, or respiratory syncytial viral proteins. These cells may be adapted for serum or serum-free monolayer, suspension, or fermentation culture, and ready for direct infection, transfection and plaque assay.

[0497] Extracts of wild-type AcNPV infected and uninfected Sf9 cells are useful for blocking non-specific binding of antibodies and other reagents to virus and insect cell proteins. The extracts are also useful for running as negative controls on Western blots, ELISA, binding assays, or enzymatic assays in which target proteins are analyzed in cell lysates.

[0498] In one embodiment, the present invention contemplates a VLP vaccine comprising proteins from different paramyxovirus strains. In one embodiment, the paramyxovirus strain is selected from the group including, but not limited to, Newcastle disease virus, measles virus, parainfluenza virus 3, or respiratory syncytial virus. In one embodiment, the NDV strain is virulent. In another embodiment, the virulent NDV strain may be selected from the group comprising strain AV and strain Hertz. In one embodiment, the NDV strain is avirulent. In another embodiment, the avirulent strain comprises strain B1.

[0499] In one embodiment, the present invention contemplates a composition comprising a cDNA clones encoding at least one paramyxovirus structural protein. In one embodiment, the structural protein comprises an HN glycoprotein. In one embodiment, the paramyxovirus is selected from the group including, but not limited to, Newcastle disease virus, measles virus, parainfluenza virus 3, or respiratory syncytial virus. In one embodiment, the clone is derived from a virulent NDV strain. In another embodiment, the virulent NDV strain may be selected from the group comprising strain AV and strain Hertz. In another embodiment, the clone is derived from an avirulent NDV strain. In one embodiment, the avirulent NDV strain comprises strain B1.

### VI. VLP Vaccine Sequence Tags

[0500] In another embodiment, the present invention contemplates a paramyxovirus VLP vaccine such as, but not limited to, a Newcastle disease virus VLP vaccine, a measles virus VLP vaccine, a parainfluenza virus 3 VLP vaccine, or a respiratory syncytial virus VLP vaccine, wherein said vaccine comprises a sequence tag. In one embodiment, the vaccine is administered to a host. In one embodiment, the sequence tag is detected.

[0501] In one embodiment, the present invention contemplates a vector comprising at least one cDNA encoding a paramyxoviral protein, wherein said cDNA comprises a sequence tag. In one embodiment, the cDNA is transfected into a host cell. In one embodiment, the cDNA is incorporated into a host genome. In another embodiment, the cDNA resides in the host cytoplasm. In one embodiment, the sequence tag is detected.

[0502] A. Antibody Tags

[0503] The present invention contemplates some embodiments comprising a paramyxoviral glycoprotein expressed with a terminal sequence tag. In one embodiment, the tag comprises FLAG, HA and MYC tags.

[0504] In response to the rapidly growing field of proteomics, the use of recombinant proteins has increased greatly in recent years. Recombinant hybrids contain a polypeptide fusion partner, termed affinity tag (i.e., for example, a sequence tag), to facilitate the purification of the target polypeptides. The advantages of using fusion proteins to facilitate purification and detection of recombinant proteins are well-recognized. The present invention is compatible with various affinity sequence tags including, but not limited to, Arg-tag, calmodulin-binding peptide, cellulose-binding domain, DsbA, c-myc-tag, glutathione S-transferase, FLAG-tag, HAT-tag, His-tag, maltose-binding protein, NusA, S-tag, SBP-tag, Strep-tag, and thioredoxin. Terpe K., “Overview of tag protein fusions: from molecular and biochemical fundamentals to commercial systems” Appl Microbiol Biotechnol. 60:523-33 (2003).

[0505] FLAG, HA, and MYC are short amino acid sequences for which there are commercially available antibodies (i.e., for example, ELISA kits). In one embodiment, a F protein comprises a terminal FLAG tag. In one embodiment, the terminal comprises the C-terminal. In another embodiment, the terminal comprises the N-terminal. Although it is not necessary to understand the mechanism of an invention, it is believed that F or HN viral proteins comprising a terminal sequence tag (i.e., for example, FLAG or HA) are completely functional. It is further believed that when an F protein (or any other viral protein) comprising a terminal tag is incorporated into a VLP, immunized animals will make antibodies not only to the F protein, but also to the terminal tag (i.e., for example, a FLAG amino acid sequence).

[0506] Antibodies specific for sequence tags have affinities for specific protein sequences, known as an epitopes. An epitope has the property that it selectively interacts with molecules and/or materials containing acceptor groups. The present invention is compatible with many epitope sequences reported in the literature including, but not limited to, HisX6 (HHHHHH) (SEQ ID NO:91) (ClonTech), C-myc (-EQKLISEEDL) (SEQ ID NO:92) (Roche-BM), FLAG (DYKDDDDK) (SEQ ID NO:93) (Stratagene), SteptTag (WSHPQFEK) (SEQ ID NO:94) (Sigma-Genosys), and HA Tag (YPYDVPDYA) (SEQ ID NO:95) (Roche-BM).

[0507] The FLAG peptide (Asp-Tyr-Lys-Asp-Asp-Asp-Asp-Lys) (SEQ ID NO:93) has been used as an epitope tag in a variety of cell types. For example, the modification of the cytomegalovirus (CMV) promoter containing vector, pCMV5, created two transient expression vectors designed for secretion and intracellular expression of FLAG-fusion proteins in mammalian cells. As a functional test, the bacterial alkaline phosphatase gene was cloned into both vectors, and anti-FLAG monoclonal antibodies were used for detection of FLAG epitope-tagged bacterial alkaline phosphatase in mammalian cells. In addition, secreted bacterial alkaline phosphatase was purified from the extracellular medium by anti-FLAG affinity chromatography. Chubet et al., “Vectors for expression and secretion of FLAG epitope-tagged proteins in mammalian cells” Biotechniques 20:136-41 (1996).

[0508] The net negatively charged HA-tag sequence (Tyr-Pro-Tyr-Asp-Val-Pro-Asp-Tyr-Ala) (SEQ ID NO:95) from the hemagglutinin influenza virus has proven useful in tagging proteins related to a wide variety of proteomic applications. In one embodiment, embodiment the present invention contemplates an improved HA epitope tag. Although it is not necessary to understand the mechanism of an invention, it is believed that the ability to metabolically label proteins with ³⁵S-methionine facilitates the analysis of protein synthesis and turnover. However, efficient labeling of proteins in vivo is often limited by a low number of available methionine residues, or by deleterious side-effects associated with protein overexpression. To overcome these limitations, a methionine-rich variant of the widely used HA tag, called HAM, maybe useful with ectopically expressed proteins. In one embodiment, the present invention contemplates the development of a series of vectors, and corresponding antisera, for the expression and detection of HAM-tagged VLP viral proteins. These HAM tags improve the sensitivity of ³⁵S-methionine labeling and permit the analysis of Myc oncoprotein turnover even when HAM-tagged Myc is expressed at levels comparable to that of the endogenous protein. Because of the improved sensitivity provided by the HAM tag, the vectors described herein should be useful for the detection of radiolabeled VLP proteins. Herbst et al., “HAM: a new epitope-tag for in vivo protein labeling” Mol Biol Rep. 27:203-8 (2000).

[0509] Alternatively, antibodies may be generated to recognize specific sequences within a protein or oligonucleotide. Such antibodies may be polyclonal or monoclonal. For example, specific sequences to a carcinoembryonic antigen may be detectable by antibodies. Barnett et al., “Antibody preparations specifically binding to unique determinants of CEA antigens or fragments thereof and use of the antibody preparations in immunoassays” U.S. Pat. No. 6,013,772 (2000) (herein incorporated by reference). Similarly, antibodies may be raised to specific nucleotide sequences. Tchen et al., “Probe containing a modified nucleic acid recognizable by specific antibodies and use of this probe to detect and characterize a homologous DNA sequence” U.S. Pat. No. 5,098,825 (1992) (herein incorporated by reference).

[0510] Numerous immunoassays may be used according to the present invention. The readout systems capable of being employed in these assays are numerous and non-limiting examples of such systems include fluorescent and colorimetric enzyme systems, radioisotopic labeling and detection and chemiluminescent systems. For example, an antibody preparation having a sequence-specific affinity for a sequence-tagged NDV viral protein (preferably a VLP particle protein) is attached to a solid phase (i.e., for example, a microtiter plate or latex beads). This antibody-VLP protein complex is then washed to remove unbound VLP particle proteins. After washing, color or fluorescence is developed by adding a chromogenic or fluorogenic substrate to activate the VLP protein sequence tag. The amount of color or fluorescence developed is proportional to the amount of VLP protein in the sample.

[0511] B. Chemical Tags

[0512] Sequence tags (i.e., nucleotide and/or protein sequences) also include molecules which will be recognized by the enzymes of the transcription and/or translation process without steric or electrostatic interference. Detection of sequence tags may occur through release of a label. Such labels may include, but are not limited to one or more of any of dyes, radiolabels, binding moieties such as biotin, mass tags, such as metal ions or chemical groups, charge tags, such as polyamines or charged dyes, haptens such as digoxygenin, luminogenic, phosphorescent or fluorogenic moieties, and fluorescent dyes, either alone or in combination with moieties that can suppress or shift emission spectra, such as by fluorescence resonance energy transfer (FRET) or collisional fluorescence energy transfer. Aizenstein et al., “Methods and compositions for detecting target sequences” U.S. Pat. No. 6,913,881 (2005) (herein incorporated by reference).

[0513] When TdT or polyA polymerase is employed, an oligonucleotide may contain a 5′end label. The invention is not limited by the nature of the 5′end label; a wide variety of suitable 5′ end labels are known to the art and include biotin, fluorescein, tetrachlorofluorescein, hexachlorofluorescein, Cy3 amidite, Cy5 amidite and digoxigenin. A radioisotope label (e.g., a 32P or 35S-labelled nucleotide) may be placed at either the 5′ or 3′end of the oligonucleotide or alternatively, distributed throughout the oligonucleotide (i.e., a uniformly labeled oligonucleotide). A biotinylated oligonucleotide may be detected by probing with a streptavidin molecule that is coupled to an indicator (e.g., alkaline phosphatase or a fluorophore) or a hapten such as dioxigenin and may be detected using a specific antibody coupled to a similar indicator. The reactive group may also be a specific configuration or sequence of nucleotides that can bind or otherwise interact with a secondary agent, such as another nucleic acid, and enzyme, or an antibody.

[0514] To be useful, sequence tags must possess certain physical and physio-chemical properties. First, a sequence tag must be suitable for incorporation into either a growing peptide chain or oligonucleotide. This may be determined by the presence of chemical groups which will participate in peptide or phosphodiester bond formation. Second, sequence tags should be attachable to a tRNA molecule or a nucleic acid polymerase complex. Third, sequence tags should have one or more physical properties that facilitate detection and possibly isolation of nascent proteins or oligonucleotides. Useful physical properties include a characteristic electromagnetic spectral property such as emission or absorbance, magnetism, electron spin resonance, electrical capacitance, dielectric constant or electrical conductivity.

[0515] Useful sequence tags comprise native amino acids coupled with a detectable label, detectable non-native amino acids, detectable amino acid analogs and detectable amino acid derivatives. Labels and other detectable moieties may be ferromagnetic, paramagnetic, diamagnetic, luminescent, electrochemiluminescent, fluorescent, phosphorescent, chromatic or have a distinctive mass. Fluorescent moieties which are useful as sequence tags include dansyl fluorophores, coumarins and coumarin derivatives, fluorescent acridinium moieties and benzopyrene based fluorophores. Preferably, the fluorescent marker has a high quantum yield of fluorescence at a wavelength different from native amino acids and more preferably has high quantum yield of fluorescence can be excited in both the UV and visible portion of the spectrum. Upon excitation at a preselected wavelength, the marker is detectable at low concentrations either visually or using conventional fluorescence detection methods. Electrochemiluminescent markers such as ruthenium chelates and its derivatives or nitroxide amino acids and their derivatives are preferred when extreme sensitivity is desired. DiCesare et al., BioTechniques 15:152-59 (1993). These sequence tags are detectable at the femtomolar ranges and below.

[0516] In addition to fluorescence, properties based on the interaction and response of a sequence tag to electromagnetic fields, radiation, light absorption (i.e., for example, UV, visible and infrared), resonance Raman spectroscopy, electron spin resonance activity, nuclear magnetic resonances, and mass spectrometry. Electromagnetic spectroscopic properties of a sequence tag are preferably not possessed by a naturally occurring compound and, therefore, are readily distinguishable. For example, the amino acid tryptophan absorbs near 290 nm, and has fluorescent emission near 340 nm. Thus, tryptophan analogs with absorption and/or fluorescence properties that are sufficiently different from tryptophan can be used to facilitate their detection in proteins.

[0517] For example, many different modified amino acids which can be used as sequence tags are commercially available (Sigma Chemical; St. Louis, Mo.; Molecular Probes; Eugene, Oreg.). One such sequence tag is N-∈-dansyllysine and may created by the misaminoacylation of a dansyl fluorophore to a tRNA molecule. Another such sequence tag is a fluorescent amino acid analog based on the highly fluorescent molecule coumarin. This fluorophore has a much higher fluorescence quantum yield than dansyl chloride and can facilitate detection of much lower levels. Rothschild et al., “Methods for the detection, analysis and isolation of nascent proteins” U.S. Pat. No. 6,875,592 (2005) (herein incorporated by reference).

[0518] Sequence tags for a protein can be chemically synthesized from a native amino acid and a molecule with marker properties which cannot normally function as an amino acid. For example a highly fluorescent molecule can be chemically linked to a native amino acid group. The chemical modification can occur on the amino acid side-chain, leaving the carboxyl and amino functionalities free to participate in a polypeptide bond formation. For example, a highly fluorescent dansyl chloride can be linked to the nucleophilic side chains of a variety of amino acids including lysine, arginine, tyrosine, cysteine, histidine, etc., mainly as a sulfonamide for amino groups or sulfate bonds to yield fluorescent derivatives. Such derivatization leaves the ability to form peptide bond intact, allowing the normal incorporation of dansyllysine into a protein.

[0519] In one embodiment, the present invention contemplates a fluorophore comprising a dipyrrometheneboron difluoride (BODIPY) derivative. The core structure of all BODIPY fluorophores is 4,4-difluoro-4-bora-3a,4a-diaza-s-indacene. See U.S. Pat. Nos. 4,774,339; 5,187,288; 5,248,782; 5,274,113; 5,433,896; 5,451,663 (all hereby incorporated by reference). All BODIPY fluorophores have a high extinction coefficient, high fluorescence quantum yield, spectra that are insensitive to solvent polarity and pH, narrow emission bandwidth resulting in a higher peak intensity compared to other dyes such as fluorescein, absence of ionic charge and enhanced photostability compared to fluorescein. The addition of substituents to the basic BODIPY structure which cause additional conjugation can be used to shift the wavelength of excitation or emission to convenient wavelengths compatible with the means of detection.

[0520] A variety of BODIPY molecules are commercially available in an amine reactive form which can be used to derivatize aminoacylated tRNAs. One example of a compound from this family which exhibits superior properties for incorporation of a detectable sequence tag into nascent proteins is 4,4-difluoro-5,7-dimethyl-4-bora-3a,4a-diaza-s-indacene (BODIPY-FL). When the sulfonated N-hydroxysuccinimide (NHS) derivative of BODIPY-FL is used to place a sequence tag on an E. coli initiator tRNA^{fmet}, the labeled protein can be easily detected on polyacrylamide gels after electrophoresis using a standard UV-transilluminator and photographic or CCD imaging system. This can be accomplished by using purified tRNA^{fmet} which is first aminoacylated with methionine and then the α-amino group of methionine is specifically modified using NHS-BODIPY. Varshney et al., “Direct analysis of aminoacylation levels of tRNA in vitro” J. Biol. Chem. 266:24712-24718 (1991).

[0521] C. Unique Sequence Tags

[0522] Serial Analysis of Gene Expression (SAGE) is a technique that allows a rapid, detailed analysis of thousands of transcripts. SAGE is based on two principles. First, a short nucleotide sequence tag (i.e., for example, 9 to 10 base pairs (bps)) contains sufficient information to uniquely identify a transcript, provided it is isolated from a defined position within the transcript. For example, a sequence as short as 9 bp can distinguish 262,144 transcripts given a random nucleotide distribution at the tag site, whereas current estimates suggest that even the human genome encodes only about 80,000 transcripts. Second, concatenation of short sequence tags allows the efficient analysis of transcripts in a serial manner by the sequencing of multiple tags within a single clone. As with serial communication by computers, wherein information is transmitted as a continuous string of data, serial analysis of the sequence tags requires a means to establish the register and boundaries of each tag.

[0523] Double-stranded cDNA may then be synthesized from mRNA by means of a biotinylated oligo(dT) primer. The cDNA is then cleaved with a restriction endonuclease (anchoring enzyme) that can be expected to cleave most transcripts at least once. Typically, restriction endonucleases with 4-bp recognition sites are used for this purpose because they cleave every 256 bp on average, whereas most transcripts are considerably larger. The most 3′ portion of the cleaved cDNA is then isolated by binding to streptavidin beads. This process provides a unique site on each transcript that corresponds to the restriction site located closest to the polyadenylated [poly(A)] tail. The cDNA is then divided in half and ligated via the anchoring restriction site to one of two linkers containing a type IIS (tagging enzyme). Type IIS restriction endonucleases cleaves at a defined distance up to 20 bp away from their asymmetric recognition sites. The linkers are designed so that cleavage of the ligation products with the tagging enzyme results in release of the linker with a short piece of the cDNA.

[0524] For example, a combination of anchoring enzyme and tagging enzyme that would yield a 9-bp tag can be cured. After blunt ends are created, the two pools of released tags are ligated to each other. Ligated tags then serve as templates for polymerase chain reaction (PCR) amplification with primers specific to each linker. This step serves several purposes in addition to allowing amplification of the tag sequences. First, it provides for orientation and punctuation of the tag sequence in a very compact manner. The resulting amplification products contain two tags (one ditag) linked tail to tail, flanked by sites for the anchoring enzyme. In the final sequencing template, this results in 4 bp of punctuation per ditag. Second and most importantly, the analysis of ditags, formed before any amplification steps, provides a means to completely eliminate potential distortions introduced by PCR. Because the probability of any two tags being coupled in the same ditag is small, even for abundant transcripts, repeated ditags potentially produced by biased PCR can be excluded from analysis without substantially altering the final results. Cleavage of the PCR product with the anchoring enzyme allows for the isolation of ditags that can then be concentrated by ligation, cloned, and sequenced.

[0525] In addition to providing quantitative information on the abundance of known transcripts, SAGE can be used to identify NDV expressed genes. SAGE can provide both quantitative and qualitative data about gene expression. The combination of different anchoring enzymes with various recognition sites and type IIS enzymes with cleavage sites 5 to 20 bp from their recognition elements lends great flexibility to this strategy.

[0526] D. Direct Detection Technology

[0527] When a sufficient amount of a nucleic acid to be detected is available, there are advantages to detecting that sequence directly, instead of making more copies of that target, (e.g., as in PCR and LCR). Most notably, a method that does not amplify the signal exponentially is more amenable to quantitative analysis. Even if the signal is enhanced by attaching multiple dyes to a single oligonucleotide, the correlation between the final signal intensity and amount of target is direct. Such a system has an additional advantage that the products of the reaction will not themselves promote further reaction, so contamination of lab surfaces by the products is not as much of a concern. Traditional methods of direct detection including Northern and Southern blotting and RNase protection assays usually require the use of radioactivity and are not amenable to automation. Recently devised techniques have sought to eliminate the use of radioactivity and/or improve the sensitivity in automatable formats. Two examples are the “Cycling Probe Reaction” (CPR), and “Branched DNA” (bDNA).

[0528] The cycling probe reaction (CPR), uses a long chimeric oligonucleotide in which a central portion is made of RNA while the two termini are made of DNA. Duck et al., BioTech., 9:142 (1990). Hybridization of the probe to a target DNA and exposure to a thermostable RNase H causes the RNA portion to be digested. This destabilizes the remaining DNA portions of the duplex, releasing the remainder of the probe from the target DNA and allowing another probe molecule to repeat the process. The signal, in the form of cleaved probe molecules, accumulates at a linear rate. While the repeating process increases the signal, the RNA portion of the oligonucleotide is vulnerable to RNases that may be carried through sample preparation.

[0529] Branched DNA (bDNA) involves oligonucleotides with branched structures that allow each individual oligonucleotide to carry 35 to 40 labels (e.g., alkaline phosphatase enzymes). Urdea et al., Gene 61:253-264 (1987). While this enhances the signal from a hybridization event, signal from non-specific binding is similarly increased.

### VII. In Vivo Vaccination

[0530] In one embodiment, the present invention contemplates a paramyxovirus VLP vaccine comprising at least one viral glycoprotein wherein the vaccine is antigenic. In one embodiment, the vaccine stimulates an immune response to diseases including, but not limited to, Newcastle disease, measles, parainfluenza virus 3, or respiratory syncytial virus infection. In one embodiment, the present invention contemplates a method comprising administering a purified antigenic paramyxovirus VLP vaccine to a host (i.e., for example, a mouse or chicken) under conditions that generate an immune response. In one embodiment, the immune response is characterized by measuring the serum glycoprotein antibody levels. In one embodiment, the viral glycoprotein comprises an NDV glycoprotein. In one embodiment, the viral glycoprotein comprises a measles virus glycoprotein. In one embodiment, the viral glycoprotein comprises a respiratory syncytial virus glycoprotein.

[0531] In one embodiment, the present invention contemplates a method comprising administering a purified antigenic NVD, measles, parainfluenza virus 3, or respiratory syncytial virus VLP vaccine to a chicken to create a vaccinated chicken. In one embodiment, the method further comprises administering a live virus challenge to the vaccinated chicken. In one embodiment, the method further comprises determining the NDV infection rate to the vaccinated chicken.

### VIII. Vectors Containing Newcastle Disease Virus Sequences

[0532] The invention provides expression vectors containing Newcastle Disease Virus Sequences. These vectors are useful in, for example, generating VLPs that contain proteins of interest. In one embodiment, the expressed VLPs are capable of eliciting an immune response by an animal host against the protein.

[0533] The invention is premised, in part, on the inventor's discovery that expression of protein chimeras in which a heterologous type 1 protein, or a portion thereof, is flanked by a transmembrane domain and by a cytoplasmic domain of Newcastle Disease Virus fusion (F) protein results in expression of VLPs (see for example, Examples 29-31) that are capable of immunizing a host against the type 1 protein (see for example, Examples 34-36).

[0534] The invention is also based, in part, on the inventor's discovery that NDV proteins that are incorporated into VLPs elicit an immune response, and that foreign glycoproteins can be incorporated into VLPs (see, for example, Examples 32-36).

[0535] The invention is further premised, in part, on the inventor's discovery that expression of protein chimeras in which an epitope is expressed as a fusion protein with either the NDV HN protein or NDV NP protein resulted in the incorporation of the epitope into VLPs (see for example, Example 36).

[0536] In one embodiment, the invention provides a expression vector comprising, in operable combination: a) a nucleic acid sequence encoding a Newcastle Disease Virus matrix (M) protein, b) a first nucleic acid sequence encoding a transmembrane domain (TM) protein, c) a second nucleic acid sequence encoding Newcastle Disease Virus cytoplasmic domain (CT) protein, and c) a third nucleic acid sequence encoding a protein, wherein the first nucleic acid sequence is flanked by the second and third nucleic acid sequences. This is exemplified by FIGS. 164-171 and 177-178, and Examples 29-33 and 36-37.

[0537] The term “expression vector” as used herein refers to a recombinant DNA molecule containing a desired coding sequence and appropriate nucleic acid sequences necessary for the expression (i.e., transcription and/or translation) of the operably linked coding sequence in a host cell. Expression vectors are exemplified by, but not limited to, plasmid, phagemid, shuttle vector, cosmid, virus, chromosome, mitochondrial DNA, plastid DNA, and nucleic acid fragment. Nucleic acid sequences used for expression in prokaryotes include a promoter, optionally an operator sequence, a ribosome binding site and possibly other sequences. Eukaryotic cells are known to utilize promoters, enhancers, and termination and polyadenylation signals.

[0538] The terms “operable combination” and “operably linked” when in reference to the relationship between nucleic acid sequences and/or amino acid sequences refers to linking the sequences such that they perform their intended function. For example, operably linking a promoter sequence to a nucleotide sequence of interest refers to linking the promoter sequence and the nucleotide sequence of interest in a manner such that the promoter sequence is capable of directing the transcription of the nucleotide sequence of interest resulting in an mRNA that directs the synthesis of a polypeptide encoded by the nucleotide sequence of interest. The term also refers to the linkage of amino acid sequences in such a manner so that a functional protein is produced.

[0539] In another example, the nucleotide sequences encoding the TM domain and protein are operably linked if the vector containing the nucleotide sequences is capable of directing expression of the TM domain and of the protein. Thus, while not intending to limit the number of nucleotides between the nucleic acid sequence that encodes the TM domain and the nucleic acid sequence that encodes the protein of interest, in one embodiment, the vector may contain from 0 to 30 nucleotides between the nucleic acid sequence that encodes the TM domain and the nucleic acid sequence that encodes the protein of interest. In another embodiment, the vector contains from 0 to 3 nucleotides between the nucleic acid sequence that encodes the TM domain and the nucleic acid sequence that encodes the protein of interest (See, for example, FIGS. 165 and 168, and Examples 30 and 32).

[0540] Also, while not intending to limit the number of nucleotides between the nucleic acid sequence that encodes the TM domain and the nucleic acid sequence that encodes the Newcastle Disease Virus (NDV) cytoplasmic domain (CT), in one embodiment the vector may contain from 0 to 10 nucleotides between the nucleic acid sequence that encodes the TM domain and the nucleic acid sequence that encodes the NDV CT.

[0541] The term “flanked,” when used in reference to, for example, a DNA sequence that is flanked by two nucleic acid sequences, means that one of the nucleic acid sequences is located near or at the 3′-end of the DNA sequence while the other nucleic acid sequence is located near or at the 5′-end of the DNA sequence. The term “flanked,” when used in reference to, for example, a protein sequence that is flanked by two polypeptide sequences, means that one of the polypeptide sequences is located near or at the amino-terminal of the protein sequence while the other polypeptide sequence is located near or at the carboxy-terminal of the protein sequence.

[0542] A. Transmembrane Domain (TM)

[0543] In one embodiment, the invention's expression vectors are contemplated to contain nucleic acid sequences encoding a transmembrane domain. The terms “transmembrane domain” and “TM” are used interchangeably to refer to a protein sequence, and portions thereof, that spans the lipid bilayer of a cell, virus and the like. Methods for determining the TM of a protein are known in the art (Elofsson et al. (2007) Annu. Rev. Biochem. 76:125-140; Bermsel et al. (2005) Protein Science 14:1723-1728).

[0544] The TM may be derived from any membrane protein. In one embodiment, the TM is derived from a NDV protein, such as NDV F protein and NDV HN protein. In a particular embodiment, the nucleic acid sequence encodes one or more Newcastle Disease Virus fusion (F) protein transmembrane domain (TM) protein. This is useful in, for example, expressing type 1 proteins and portions thereof (see Examples 29-31), type 3 proteins and portions thereof, soluble proteins and portions thereof, and epitopes (see for example, Example 36). Exemplary Newcastle Disease Virus fusion (F) protein transmembrane domain (TM) proteins are shown in Table 4 (SEQ ID NOs: 155-169).

TABLE 4

Exemplary New Castle Disease Virus (NDV) F protein Cytoplasmic
(CT) and Transmembrane (TM) Sequences

| Strain | | |
|---|---|---|
| of NDV | TM | CT |
| AV | TSTSALITYIALTAISLVCGILSLVLACYLMY | KQKAQQKTLLWLGNNTLGQMRATTKM |
| | (SEQ ID NO: 155) | (SEQ ID NO: 170) |
| QUE | TSTSALITYIVLTVISLVCGILSLVLACYLMY | KQKAQQKTLLWLGNNTLGQMRATTKM |
| | (SEQ ID NO: 156) | (SEQ ID NO: 171) |
| ULS | TSTSALITYIVLTVISLVCGILSLVLACYLMY | KQKAQQKTLLWLGNNTLGQMRATTKM |
| | (SEQ ID NO: 157) | (SEQ ID NO: 172) |
| B1 | TSTSALITYIVLTIISLVCGILSLILAFYLMY | KQKAQQKTLLWLGNNTLGQMRATTKM |
| | (SEQ ID NO: 158) | (SEQ ID NO: 173) |
| LAS | TSTSALITYIVLTIISLVCGILSLILAFYLMY | KQKAQQKTLLWLGNNTLGQMRATTKM |
| | (SEQ ID NO: 159) | (SEQ ID NO: 174) |
| TEX | TSTSALITYIVLTIISLVCGILSLVLAFYLMY | KQKAQQKTLLWLGNNTLGQMRATTKM |
| | (SEQ ID NO: 160) | (SEQ ID NO: 175) |
| D26 | TSTSALITYIFLTVISLVCGILSLVLACYLMY | KQKAQQKTLLWLGNNTLGQMRATTKM |
| | (SEQ ID NO: 161) | (SEQ ID NO: 176) |
| MIY | TSTSALITYIVLTVISLVCGILSLVLACYLMH | KQKAQQKTLLWLGNNTLGQMRATTKA |
| | (SEQ ID NO: 162) | (SEQ ID NO: 177) |
| HER | TSTSALITYIVLTVISLVCGVLSLVLAFYLMY | KQKAQQKTLLWLGNNTLGQMRATTKI |
| | (SEQ ID NO: 163) | (SEQ ID NO: 178) |
| ITA | TSTSALITYIVLTVISLVCGVLSLVLAFYLMY | KQKAQQKTLLWLGNNTLGQMRATTKI |
| | (SEQ ID NO: 164) | (SEQ ID NO: 179) |
| MEX | TSTSALITYIVLAVVSLAFGVISLVLACYLMY | KQKAQQKTLLWLGNNTLDQMRATTRT |
| 37821- | (SEQ ID NO: 165) | (SEQ ID NO: 180) |
| 550-1/96 | | |
| HOND | TSTSALITYIVLAVISLAFGVISLVLACYLMY | KQKAQQKTLLWLGNNTLDQMRATTRT |
| 44815/00 | (SEQ ID NO: 166) | (SEQ ID NO: 181) |
| ZJ1-00 | TSTSALITYIVLTVISLVFGALSLGLACYLMY | KQKAQQKTLLWLGNNTLDQMRATTRA |
| China | (SEQ ID NO: 167) | (SEQ ID NO: 182) |
| SD6.04 | TSTSALITYIVLTIISLVFGILSLVLACYLMY | KQKAQQKTLLWLGNNTLDQMRATT |
| China | (SEQ ID NO: 168) | (SEQ ID NO: 183) |
| S52.98 | INTSALITYIVLTVISLVFSALGLILGCYLMY | KQKAQQKTLLWLGNNTLDQMRATT |
| China | (SEQ ID NO: 169) | (SEQ ID NO: 184) |

[0545] In a further embodiment, the nucleic acid sequence encodes one or more Newcastle Disease Virus heamagglutinin-neuraminidase (HN) protein transmembrane domain (TM) protein. This is useful in, for example, expressing type 2 proteins and portions thereof (see Examples 32-33), type 3 proteins and portions thereof, soluble proteins and portions thereof, and epitopes (see for example, Example 36). Exemplary Newcastle Disease Virus HN protein transmembrane domain (TM) proteins are shown in Table 5 (SEQ ID NOs: 136-154).

TABLE 5

Exemplary New Castle Disease Virus (NDV) HN protein Cyto-
plasmic (CT) and Transmembrane (TM) Sequences

| Strain | | |
|---|---|---|
| of NDV | CT | TM |
| AV | MNRAVCQVALENDEREAKNTWRLVFR | IAILLLTVMTLAISAAALAYSM |
| | (SEQ ID NO: 117) | (SEQ ID NO: 136) |
| V | MNRAVCQVALENDEREAKNTWRLVFR | IAILLLTVMTLAISAAALAYSM |
| | (SEQ ID NO: 118) | (SEQ ID NO: 137) |
| QUE | MDRAVSQVALENDEREAKNTWRLVFR | IAILLSTVVTLAISAAALAYSM |
| | (SEQ ID NO: 119) | (SEQ ID NO: 138) |
| ULS | MDRAVSQVALENDEREAKNTWRLVFR | IAILFLTVVTLAISAAALAYSM |
| | (SEQ ID NO: 120) | (SEQ ID NO: 139) |
| B1 | MDRAVSQVALENDEREAKNTWRLIFR | IAILFLTVVTLAISVASLLYSM |
| | (SEQ ID NO: 121) | (SEQ ID NO: 140) |
| LAS | MDRAVSQVALENDEREAKNTWRLIFR | IAILFLTVVTLAISVASLLYSM |
| | (SEQ ID NO: 122) | (SEQ ID NO: 141) |
| TEX | MDRAVSQVALENDEREAKNTWRLIFR | IAILLLTVVTLATSVASLVYSM |
| | (SEQ ID NO: 123) | (SEQ ID NO: 142) |
| D26 | MDRAVSQVALENDEREAKNTWRLVFR | IAILLLTVVTLAISAAALAYSM |
| | (SEQ ID NO: 124) | (SEQ ID NO: 143) |
| MIY | MDRTVNQVALENDEREAKNTWRLVFR | IATLLLIVMTLAFSAAALAYSM |
| | (SEQ ID NO: 125) | (SEQ ID NO: 144) |
| HER | MDRAVSRVALENEEREAKNTWRFVFR | IAILLLIVITLAISAAALVYSM |
| | (SEQ ID NO: 126) | (SEQ ID NO: 145) |
| ITA | MDLPVGRVALENEEREAKNTWRFVFR | IAIFLLIVITLAISAAALVYSM |
| | (SEQ ID NO: 127) | (SEQ ID NO: 146) |
| CHI | MDRAVNRVVLENEEREAKNTWRLVFR | IAVLLLMVMTLAISAAALVYSM |
| | (SEQ ID NO: 128) | (SEQ ID NO: 147) |
| IBA | MDRAVSRVVLENEEREAKNTWRFVFR | IAVLLLIVMTLAISAAALVYSM |
| | (SEQ ID NO: 129) | (SEQ ID NO: 148) |
| JS-1/06 | MDRAVNRVVLENEEREAKNTWRLVF | IAVLLLMVMTLAISAAALAYSTGAST |
| CHINA | (SEQ ID NO: 130) | (SEQ ID NO: 149) |
| GPMV | MDRAVNRVVLENEEREAKNTWRLVFR | IAVLLLMVMTLAISSAALAYSTGAST |
| QY97-1 | (SEQ ID NO: 131) | (SEQ ID NO: 150) |
| CHINA | | |
| ASTR/74 | MDRVVSRVVLENEEREAKNTWRLVFR | IAVLLLIVMTLAISAAALVYSMGAIM |
| RUSSIA | (SEQ ID NO: 132) | (SEQ ID NO: 151) |
| MK13 | MDHTVNRVVLENEEREAKNTWRSVFR | TTVLLLMVMTLAISIAALVYIMGAST |
| IRAN | (SEQ ID NO: 133) | (SEQ ID NO: 152) |
| US/CA | MDRVVSRVVLENEEREAKNTWRLVFR | IAVLSLVVMTLAISVATLVYSM |
| 211472/02 | (SEQ ID NO: 134) | (SEQ ID NO: 153) |
| UNITED | | |
| STATES | | |
| MEXICO/96 | MDRVVSRVVLENEEREAKNTWRLVFR | IAVLSLIVMTLAISVAALVYSM |
| 37821-550 | (SEQ ID NO: 135) | (SEQ ID NO: 154) |

[0546] In another embodiment, the nucleic acid sequence encodes one or more transmembrane domain protein that is derived from a membrane protein other than from an NDV protein. This is useful in, for example, expressing type 1 proteins and portions thereof (see for example, Examples 29-31), type 2 proteins and portions thereof, type 3 proteins and portions thereof, soluble proteins and portions thereof, and epitopes (see for example, Example 36).

[0547] TM derived from proteins other than from an NDV protein include, but are not limited to, the TM of influenza virus HA protein (type 1 glycoprotein) (see, for example, FIG. 177), TM of influenza virus NA protein (type 2 glycoprotein) (see, for example, FIG. 178), TM of the G protein-coupled receptor (U.S. Pat. No. 7,105,488), TM of leucine zipper EF hand transmembrane receptor (U.S. Pat. No. 7,005,254), TM of Escherichia coli LipoF and OmpF proteins (U.S. Pat. No. 6,875,853), TM of Escherichia coli OmpA protein (U.S. Pat. No. 5,348,867), TM of human T cell receptor α chain (U.S. Pat. No. 6,696,545), TM of HLA class I and CD4 proteins (U.S. Pat. No. 6,423,316), TM of human MHC HLA-G protein (U.S. Pat. No. 6,291,659), TM of squalene synthetase (U.S. Pat. No. 5,589,372), and TM of CD4 and of CD8 (U.S. Pat. No. 5,250,431).

[0548] B. Newcastle Disease Virus Cytoplasmic Domain (CT)

[0549] In one embodiment, the invention's expression vectors are contemplated to contain a nucleic acid sequence encoding a Newcastle Disease Virus cytoplasmic domain. The terms “cytoplasmic domain,” “cytoplasmic tail,” and “CT” are used interchangeably to refer to a protein sequence, and portions thereof, that is on the cytoplasmic side of the lipid bilayer of a cell, virus and the like. Methods for determining the CT of a protein are known in the art (Elofsson et al. (2007) and Bermsel et al. (2005)).

[0550] In one embodiment, the nucleic acid sequence encodes a Newcastle Disease Virus fusion (F) protein cytoplasmic domain (CT) protein. This is useful in, for example, expressing type 1 proteins and portions thereof (see for example, Examples 29-31), type 3 proteins and portions thereof, soluble proteins and portions thereof, and epitopes (see for example, Example 36). Examples of NDV fusion (F) protein CT proteins are in Table 4, supra (SEQ ID NOs: 170-184).

[0551] In another embodiment, the nucleic acid sequence encodes a Newcastle Disease Virus heamagglutinin-neuraminidase (HN) protein cytoplasmic domain (CT) protein. This is useful in, for example, expressing type 2 proteins and portions thereof (see for example, Examples 32-33), type 3 proteins and portions thereof, soluble proteins and portions thereof, and epitopes (see for example, Example 36). Examples of NDV heamagglutinin-neuraminidase (HN) protein CT proteins are in Table 5, supra (SEQ ID NOs: 117-135).

[0552] C. Proteins of Interest

[0553] In one embodiment, the invention's expression vectors are contemplated to contain a nucleic acid sequence encoding a protein of interest. The term “protein of interest” refers to any protein, or portion thereof, that one of ordinary skill in the art may wish to use for any reason, including, without limitation, endogenous and heterologous proteins. The terms “endogenous” and “wild type” refer to a sequence that is naturally found in the cell, virus, or virus-like particle into which it is introduced so long as it does not contain some modification relative to the naturally-occurring sequence. The term “heterologous” refers to a sequence, which is not endogenous to the cell, virus, or virus-like particle into which it is introduced. For example, heterologous DNA includes a nucleotide sequence, which is ligated to, or is manipulated to become ligated to, a nucleic acid sequence to which it is not ligated in nature, or to which it is ligated at a different location in nature. Heterologous DNA also includes a nucleotide sequence, which is naturally found in the cell or VLP into which it is introduced and which contains some modification relative to the naturally-occurring sequence. Generally, although not necessarily, heterologous DNA encodes heterologous RNA and protein of interest that are not normally produced by the cell, virus, or virus-like particle into which it is introduced.

[0554] Examples of proteins of interest include proteins, and portions thereof, that are expressed as glycoproteins, membrane proteins and portions thereof, soluble proteins and portions thereof, epitopes and portions thereof, and the like.

[0555] The vectors of the invention may be used to express one or more protein of interest. Where it is desirable to simultaneously express more than one protein of interest, the invention contemplates that the simultaneously expressed proteins may be of the same type (e.g., type 1 protein, type 2 protein, type 3 protein, soluble protein, epitope). Alternatively, the simultaneously expressed proteins may be of different types (for example, type 1 protein combined with type 2 protein, type 1 protein combined with type 3 protein, etc.). Simultaneously expressed proteins may be encoded by nucleotide sequences that are on the same, or different, vectors.

[0556] a. Membrane Proteins

[0557] In one embodiment, the protein of interest comprises a membrane protein. A “membrane protein” refers to a protein that is at least partially embedded in the lipid bilayer of a cell, virus and the like. Membrane proteins include type 1 proteins, type 2 proteins, and type 3 proteins (Exemplified in Tables 6-11). Methods for determining the type of membrane protein are known (for example, Singer (1990) Annu. Rev. Cell Biol. 6:247-296 and High et al. (1993) J. Cell Biol. 121:743-750), including commercially available software, such as McVector software, Oxford Molecular.

[0558] In one embodiment, the protein of interest comprises an ectodomain of a membrane protein. The term “ectodomain” when in reference to a membrane protein refers to the portion of the protein that is exposed on the extracellular side of a lipid bilayer of a cell, virus and the like. Methods for determining the ectodomain of a protein are known in the art (Singer (1990); High et al. (1993), and McVector software, Oxford Molecular).

[0559] Exemplary ectodomains include, but are not limited to those described in U.S. Pat. Nos. 7,262,270; 7,253,254; 7,250,171; 7,223,390; 7,189,403; 7,122,347; 7,119,165; 7,101,556; 7,067,110; 7,060,276; 7,029,685; 7,022,324; 6,946,543; 6,939,952; 6,713,066; 6,699,476; 6,689,367; 6,566,074; 6,531,295; 6,417,341; 6,248,327; 6,140,059; 5,851,993; 5,847,096; 5,837,816; 5,674,753; and 5,344,760. Additional examples of ectodomains include ectodomains of membrane type 1 proteins (Table 7), type 2 proteins (Table 9), and type 3 proteins (Table 11).

[0560] In one embodiment, the protein of interest comprises a type 1 protein. The term “type 1 protein” refers to a membrane protein that contains one transmembrane domain (TM) sequence, which is embedded in the lipid bilayer of a cell, virus and the like. The portion of the protein on the NH₂-terminal side of the TM domain is exposed on the exterior side of the membrane, and the COOH-terminal portion is exposed on the cytoplasmic side. Exemplary type 1 proteins are described in Table 6.

TABLE 6
Exemplary Type 1 Proteins

| | Amino Acid | | Nucleotide | |
|---|---|---|---|---|
| | Sequence | | Sequence | |
| | SEQ ID | Figure | SEQ ID | Figure |
| Source | NO: | No. | NO: | No. |
| Fujian Strain of Influenza | 185 | 179 | 208 | 180 |
| HA | | | | |
| Canine Distemper Virus | 186 | 75 | — | — |
| Fusion Protein | | | | |
| Cytomegalovirus (CMV) | 187 | 76 | — | — |
| gG glycoprotein | | | | |
| Cytomegalovirus gH | 188 | 77 | 209 | 78 |
| Glycoprotein | | | | |
| Ebola virus Glycoprotein | 189 | 79 | 210 | 80 |
| precursor | | | | |
| Human Immunodeficiency | 190 | 81 | 211 | 82 |
| Virus (HIV) envelope | | | | |
| protein | | | | |
| Herpes Simplex virus | 191 | 83 | 212 | 84 |
| (HSV) gH glycoprotein | | | | |
| Herpes Simplex virus | 192 | 85 | 213 | 86 |
| (HSV) gL Glycoprotein | | | | |
| Influenza virus HA-type | 193 | 87 | — | — |
| H1 | | | | |
| Influenza Virus B | 214 | 88 | — | — |
| HA | | | | |
| Influenza virus HA from | 194 | 89 | 215 | 90 |
| influenza B Malaysia | | | | |
| Influenza virus HA second | 195 | 91 | 216 | 92 |
| representative H1 | | | | |
| Influenza virus HA | 196 | 93 | 217 | 94 |
| representative H3 | | | | |
| Influenza virus HA | 197 | 95 | 218 | 96 |
| representative H5 HA | | | | |
| Influenza virus HA | 198 | 97 | 219 | 98 |
| representative H7 HA | | | | |
| Influenza virus HA | 199 | 99 | 220 | 100 |
| representative H9 HA | | | | |
| Nipah virus F protein | 200 | 101 | 221 | 102 |
| Respiratory Syncytial | 201 | 103 | 222 | 104 |
| Virus (RSV) F protein (first | | | | |
| example) | | | | |
| Respiratory Syncytial | 202 | 105 | — | — |
| Virus F protein (second | | | | |
| example) | | | | |
| SARS virus surface spike | 203 | 106 | 223 | 107 |
| glycoprotein | | | | |
| Varicella Zoster Virus gB | 205 | 108 | 224 | 109 |
| glycoprotein | | | | |
| Varicella Zoster Virus gE | 206 | 110 | 225 | 111 |
| glycoprotein | | | | |
| Varicella Zoster Virus gI | 207 | 112 | 226 | 113 |
| glycoprotein | | | | |

[0561] In another embodiment, the protein of interest comprises an ectodomain of a type 1 protein. The term “ectodomain” of a type 1 protein refers to at least a portion of the type 1 protein on the NH₂-terminal side of the TM domain that is exposed on the exterior side of the membrane. Exemplary type 1 protein ectodomains are listed in Table 7.

TABLE 7
Exemplary Ectodomain Sequences of Type 1 Proteins

| | Amino Acid Sequence | |
|---|---|---|
| | SEQ ID | Figure |
| Source | NO: | No. |
| Influenza Virus Fujian strain HA protein | 251 | 206 |
| CMV gB protein | 252 | 207 |
| CMV gH protein | 253 | 208 |
| Ebola G protein | 254 | 209 |
| Influenza virus HA H1 protein | 255 | 210 |
| Influenza virus B HA protein | 256 | 211 |
| Influenza virus H3 HA protein | 257 | 212 |
| HIV envelope protein | 258 | 213 |
| HSV gH protein | 259 | 214 |
| Influenza virus H7 HA protein | 260 | 215 |
| Influenza virus H9 protein | 261 | 216 |
| Influenza Virus H5 protein | 262 | 217 |
| Nipah virus F protein | 263 | 218 |
| Respiratory Syncytial virus F protein | 264 | 219 |
| Respiratory Syncytial virus F protein | 265 | 220 |
| SARS virus S glycoprotein | 266 | 221 |
| Varicella Zoster Virus gB protein | 267 | 222 |
| Varicella Zoster Virus gE protein | 268 | 223 |
| Varicella Zoster Virus gI protein | 269 | 224 |

[0562] Data herein shows expression of the exemplary type 1 protein ectodomain of influenza virus Fujian strain HA protein (SEQ ID NO: 251) (see for example, Examples 29-31).

[0563] In a further embodiment, the protein of interest comprises a type 2 protein. The term “type 2 protein” refers to a membrane protein that contains one transmembrane domain (TM) sequence, which is embedded in the lipid bilayer of a cell, virus and the like. In contrast to type 1 proteins, in type 2 proteins the portion of the protein on the NH₂-terminal side of the TM domain is exposed on the cytoplasmic side of the membrane, and the COOH-terminal portion is exposed on the exterior side. Exemplary type 2 proteins as shown in Table 8.

TABLE 8
Exemplary Type 2 Proteins

| | Amino Acid | | Nucleotide | |
|---|---|---|---|---|
| | Sequence | | Sequence | |
| | SEQ ID | Figure | SEQ ID | Figure |
| Source | NO: | No. | NO: | No. |
| Fujian Influenza NA | 114 | 181 | 132 | 182 |
| Canine Distemper Virus H | 115 | 114 | — | — |
| Glycoprotein | | | | |
| Avian Metapneumovirus G | 116 | 115 | 133 | 116 |
| Protein | | | | |
| Human Metapneumovirus | 117 | 117 | 134 | 118 |
| G Glycoprotein | | | | |
| Human Respiratory | 118 | 119 | — | — |
| Syncytial Virus G | | | | |
| Glycoprotein | | | | |
| Influenza Virus B NA | 119 | 120 | — | — |
| Glycoprotein | | | | |
| Influenza Virus N1 NA | 120 | 121 | 135 | 122 |
| from H5N1 Virus | | | | |
| Influenza Virus NA N2 | 121 | 123 | — | — |
| (first example) | | | | |
| Influenza Virus NA N2 | 122 | 124 | 136 | 125 |
| type (second example) | | | | |
| Influenza Virus NA N3 | 123 | 126 | 137 | 127 |
| type | | | | |
| Measles Virus HA Protein | 124 | 128 | 138 | 129 |
| Mumps Virus HN | 125 | 130 | 139 | 131 |
| Nipah Virus G Protein | 126 | 132 | 140 | 133 |
| Parainfluenza Virus Type | 127 | 134 | 141 | 135 |
| 2 HN Protein | | | | |
| Parainfluenza Virus 3 HN | 128 | 136 | — | — |
| Glycoprotein (first | | | | |
| example) | | | | |
| Parainfluenza 3 Virus HN | 129 | 137 | 142 | 138 |
| (second example) | | | | |
| Respiratory Syncytial | 130 | 139 | 143 | 140 |
| Virus G Protein | | | | |
| Vaccinia Virus Surface | 131 | 141 | 144 | 142 |
| Antigen | | | | |

[0564] In a particular embodiment, the protein of interest comprises an ectodomain of a type 2 protein. The term “ectodomain” of a type 2 protein refers to at least a portion of the type 2 protein on the COOH-terminal side of the TM domain that is exposed on the exterior side of the membrane. Examples of type 2 protein ectodomains are listed in Table 9.

TABLE 9
Exemplary Ectodomain Sequences of Type 2 Proteins

| | Amino Acid Sequence | |
|---|---|---|
| | SEQ ID | Figure |
| Source | NO: | No. |
| Influenza Virus Fujian strain NA protein | 270 | 225 |
| Metapneumovirus G protein | 271 | 226 |
| Influenza Virus B NA protein | 272 | 227 |
| Human Metapneumovirus G protein | 273 | 228 |
| Human respiratory Syncytial virus G | 274 | 229 |
| protein | | |
| Influenza virus N1 NA protein | 275 | 230 |
| Influenza virus N3 NA protein | 276 | 231 |
| Influenza virus N2 NA protein | 277 | 232 |
| Measles virus HA protein | 278 | 233 |
| Mumps virus HN protein | 279 | 234 |
| Nipah virus G protein | 280 | 235 |
| Parainfluenza 2 virus HN protein | 281 | 236 |
| Parainfluenza virus 3 HN protein | 282 | 237 |
| Vaccinia virus surface protein | 283 | 238 |

[0565] Data herein shows expression of the exemplary type 2 protein ectodomain of influenza virus Fujian strain NA protein (SEQ ID NO: 270) (see for example, Examples 32-33).

[0566] In yet another embodiment, the protein of interest comprises a type 3 protein. The term “type 3 protein” refers to a membrane protein that contains more than one transmembrane domain (TM) sequence containing hydrophobic amino acids, which are embedded in the lipid bilayer of a cell, virus and the like. The portion of the protein on the NH₂-terminal side of the TM domain may be exposed on either the cytoplasmic side or the exterior side of the membrane. Conversely, the portion of the protein on the COOH-terminal side of the TM domain may be exposed on either the cytoplasmic side or the exterior side of the membrane. Exemplary type 3 proteins are listed in Table 10.

TABLE 10
Exemplary Type 3 Proteins

| | Amino Acid | | Nucleotide | |
|---|---|---|---|---|
| | Sequence | | Sequence | |
| | SEQ ID | Figure | SEQ ID | Figure |
| Source | NO: | No. | NO: | No. |
| Epstein Barr Virus (EBV) | 145 | 143 | 150-157 | 144 |
| LMP2A protein | | | | |
| Glut 1 HTLV receptor | 146 | 145 | 158 | 146 |
| protein | | | | |
| Glutamate Receptor | 147 | 147 | 159 | 148 |
| protein | | | | |
| Hepatitis B virus L form of | 148 | 149 | 160 | 150 |
| S glycoprotein | | | | |
| Prion Protein | 149 | 151 | 161 | 152 |
| Presenilin (human) protein | 250 | 205 | — | — |

[0567] In a particular embodiment, the protein of interest comprises an ectodomain of a type 3 protein. The term “ectodomain” of a type 3 protein refers to at least a portion of the type 3 protein of either the NH₂-terminal or the COOH-terminal side of the TM domain that is exposed on the exterior side of the membrane. Table 11 lists some examples of type 3 protein ectodomains.

TABLE 11

Exemplary Ectodomain Sequences of Type 3
Proteins

Amino Acid Sequence

| | | SEQ | |
|---|---|---|---|
| | | ID | Figure |
| Source | Sequence | NO: | No. |
| Prion protein | — | 284 | 239 A |
| Prion protein | — | 285 | 239 B |
| Glut-1 protein | EEFYNQTWVHRYGES | 286 | — |
| Glut-1 protein | FEKAGVQQP | 287 | — |
| Glut-1 protein | EQLCGPY | 288 | — |
| LMP2A protein | SSYAAAQRK | 289 | — |
| LMP2A protein | RRRWRRLTVCGGIM | 290 | — |
| Presenilin | TFGLVFYFATDYLV | 291 | — |
| protein | QPFMDQLAFHQFYI | | |
| Hepatitis B | — | 292 | 240 |
| virus L form | | | |
| of HBsAg | | | |
| protein | | | |

[0568] b. Soluble Proteins

[0569] In one embodiment, the protein of interest comprises a soluble protein. The term “soluble protein” refers to a protein that is not embedded in the lipid bilayer of a cell, virus and the like. Examples of soluble proteins are listed in Table 12.

TABLE 12
Exemplary Soluble Proteins

| | Amino Acid Sequence | | Nucleotide Sequence | |
|---|---|---|---|---|
| | SEQ ID | Figure | SEQ ID | Figure |
| Source | NO: | No. | NO: | No. |
| Hepatitis A Virus VP1 | 162 | 153 | 167 | 154 |
| Human Parvovirus VP | 163 | 155 | 168 | 156 |
| (B19 Virus) | | | | |
| Norovirus VP1 | 164 | 157 | 169 | 158 |
| Human Rhinovirus VP1 | 165 | 159 | 170 | 160 |
| Human Rotavirus (strain | 166 | 161 | 171 | 162 |
| K8) VP4 | | | | |

[0570] c. Antigens and Epitopes

[0571] In one embodiment, the protein of interest comprises an antigen. The terms “antigen,” “immunogen,” “antigenic,” “immunogenic,” “antigenically active,” and “immunologically active” when made in reference to a molecule, refer to any substance that is capable of inducing a specific humoral and/or cell-mediated immune response.

[0572] In one embodiment, the antigen comprises an epitope. The terms “epitope” and “antigenic determinant” refer to a structure on an antigen, which interacts with the binding site of an antibody or T cell receptor as a result of molecular complementarity. An epitope may compete with the intact antigen, from which it is derived, for binding to an antibody. Generally, secreted antibodies and their corresponding membrane-bound forms are capable of recognizing a wide variety of substances as antigens, whereas T cell receptors are capable of recognizing only fragments of proteins which are complexed with MHC molecules on cell surfaces. Antigens recognized by immunoglobulin receptors on B cells are subdivided into three categories: T-cell dependent antigens, type 1 T cell-independent antigens; and type 2 T cell-independent antigens. Also, for example, when a protein or fragment of a protein is used to immunize a host animal, numerous regions of the protein may induce the production of antibodies which bind specifically to a given region or three-dimensional structure on the protein; these regions or structures are referred to as antigenic determinants. An antigenic determinant may compete with the intact antigen (i.e., the immunogen used to elicit the immune response) for binding to an antibody.

[0573] Exemplary epitopes include, without limitation YPYDVPDYA (SEQ ID NO: 227) (see for example, Example 36), EphrinA2 epitopes from renal cell carcinoma and prostate cancer (U.S. Pat. No. 7,297,337), hepatitis C virus epitopes (U.S. Pat. Nos. 7,238,356 and 7,220,420), vaccinia virus epitopes (U.S. Pat. No. 7,217,526), dog dander epitopes (U.S. Pat. No. 7,166,291), human papilloma virus (HPV) epitopes (U.S. Pat. Nos. 7,153,659 and 6,900,035), Mycobacterium tuberculosis epitopes (U.S. Pat. Nos. 7,037,510 and 6,991,797), bacterial meningitis epitopes (U.S. Pat. No. 7,018,637), malaria epitopes (U.S. Pat. No. 6,942,866), and type 1 diabetes mellitus epitopes (U.S. Pat. No. 6,930,181).

[0574] Data herein (see for example, Example 36) shows that the exemplary CTL epitope sequence YPYDVPDYA (SEQ ID NO: 227) was incorporated into VLPs following its expression as a fusion protein to the carboxyl terminus of NDV HN protein, to the amino terminus of NDV NP protein, or to the carboxyl terminus of NDV NP protein.

[0575] Exemplary vectors that are useful for expressing type 1 proteins, and portions thereof, contain a nucleic acid sequence that encodes a type 1 protein in operable combination with a nucleic acid sequence that encodes a Newcastle Disease Virus fusion (F) protein cytoplasmic domain (CT) protein. More preferably, but without limitation, the vector further comprises a nucleic acid sequence that encodes a Newcastle Disease Virus fusion (F) protein transmembrane domain (TM) protein. This combination is exemplified in Examples 29-31 and 36, and FIGS. 164-167 and 177.

[0576] The efficiency of expressing type 1 proteins in ND VLPs may be increased by co-expression of other Newcastle Disease Virus proteins (see for example Table 14 and FIG. 172). In one embodiment, the efficiency of expressing type 1 proteins in ND VLPs may be increased by co-expression of Newcastle Disease Virus nucleocapsid (NP) protein and Matrix (M) protein (see for example, Example 31, FIG. 167). Improved efficiency of expressing VLPs that contain type 1 proteins may also be obtained upon co-expression of Newcastle Disease Virus nucleocapsid (NP) protein, Matrix (M) protein, and fusion (F) protein (see for example, Example 31, FIG. 167). In another embodiment, VLPs that contain type 1 proteins are produced upon co-expression of Newcastle Disease Virus nucleocapsid (NP) protein, Matrix (M) protein, and NDV heamagglutinin-neuraminidase (HN) protein (see for example, Example 31, FIG. 167).

[0577] In one embodiment, NDV NP amino acid and nucleotide sequences are exemplified by SEQ ID NOs: 6, 7, 22 and 23 (see for example, FIGS. 8 and 24). In another embodiment, NDV HN amino acid and nucleotide sequences are exemplified by SEQ ID NOs: 8, 9 and 15-18 (see for example, FIGS. 9, 20 and 21). In a further embodiment, NDV F amino acid and nucleotide sequences are exemplified by SEQ ID NOs: 10, 11, 19-21 (see for example, FIGS. 10, 22 and 23). In another embodiment, NDV M amino acid and nucleotide sequences are exemplified by the sequences in Table 13.

[0578] Exemplary vectors that are useful for expressing type 2 proteins, and portions thereof, contain a nucleic acid sequence that encodes a type 2 protein in operable combination with a nucleic acid sequence that encodes a Newcastle Disease Virus heamagglutinin-neuraminidase (HN) protein cytoplasmic domain (CT) protein. In one embodiment, the vector further comprises a nucleic acid sequence that encodes a Newcastle Disease Virus heamagglutinin-neuraminidase (HN) protein transmembrane domain (TM) protein. This combination is exemplified in Examples 32-33 and 37, and FIGS. 168-171 and 178.

[0579] The efficiency of expressing type 2 proteins in ND VLPs may be increased by co-expression of other Newcastle Disease Virus proteins. In one embodiment, the efficiency of expressing type 2 proteins in ND VLPs may be increased by co-expression of Newcastle Disease Virus nucleocapsid (NP) protein and Matrix (M) protein (see for example, Example 33, FIG. 171). Improved efficiency of expressing VLPs that contain type 2 proteins may also be obtained upon co-expression of Newcastle Disease Virus nucleocapsid (NP) protein, Matrix (M) protein, and fusion (F) protein (see for example, Example 33, FIG. 171). In a further embodiment, improved efficiency of expressing VLPs that contain type 2 proteins may also be obtained upon co-expression of Newcastle Disease Virus nucleocapsid (NP) protein, Matrix (M) protein, fusion (F) protein and heamagglutinin-neuraminidase (HN) protein (see for example, Example 33, FIG. 171).

[0580] Exemplary vectors that are useful for expression of at least a portion of a type 3 protein, of a soluble protein, and of an epitope, contain nucleic acid sequences encoding these proteins of interest in operable combination with a nucleic acid sequence that encodes a Newcastle Disease Virus fusion (F) protein transmembrane domain (TM) protein, and a nucleic acid sequence that encodes a Newcastle Disease Virus fusion (F) protein cytoplasmic domain (CT) protein. This combination may be used to express the amino-terminal portion of the protein of interest on the outside surface of the expressed NDV VLP.

[0581] In an alternative embodiment for expression of at least a portion of a type 3 protein, of a soluble protein, and of an epitope, the vector contains nucleic acid sequences encoding the protein of interest in operable combination with a nucleic acid sequence that encodes a Newcastle Disease Virus heamagglutinin-neuraminidase (HN) protein transmembrane domain (TM) protein, and a nucleic acid sequence that encodes a Newcastle Disease Virus heamagglutinin-neuraminidase (HN) protein cytoplasmic domain (CT) protein. This combination may be used to express the carboxy-terminal portion of the protein of interest on the outside surface of the expressed NDV VLP.

[0582] D. Matrix Protein

[0583] In one embodiment, the invention's expression vectors are contemplated to contain nucleic acid sequences encoding Newcastle Disease Virus Matrix (M) protein, such as those exemplified in Table 13 (see, for example, Examples 29-33, 36 and 37, and FIGS. 164-171 and 177-178).

TABLE 13
Exemplary M protein from Newcastle Disease Virus (NDV) Strains

| | Amino Acid Sequence | | Nucleotide Sequence | |
|---|---|---|---|---|
| | SEQ ID | Figure | SEQ ID | Figure |
| GenBank Accession No. | NO: | No. | NO: | No. |
| AY728363 | 12 | 11A | 13 | 11B |
| M16622 | 24 | 25A | 25 | 25B |
| U25828 | 26 | 26A | 27 | 26B |
| AF431744 | 228 | 183 | 239 | 184 |
| NC_002617 | 229 | 185 | 240 | 186 |
| AY562986 | 230 | 187 | 241 | 188 |
| AY562989 | 231 | 189 | 242 | 190 |
| AY562988 | 232 | 191 | 243 | 192 |
| AY562990 | 233 | 193 | 244 | 194 |
| AY845400 | 234 | 195 | 245 | 196 |
| AJ880277 | 235 | 197 | 246 | 198 |
| EU293914 | 236 | 199 | 247 | 200 |
| AF431744 | 237 | 201 | 248 | 202 |
| AY562991 | 238 | 203 | 249 | 204 |

[0584] Sequences that encode Newcastle Disease Virus matrix (M) protein may be located on expression vectors that are “the same or different” from sequences that encode the transmembrane domain (TM) protein, cytoplasmic domain (CT) protein, and protein of interest. Thus, in one embodiment, an expression vector that contains sequences encoding the transmembrane domain (TM) protein, cytoplasmic domain (CT) protein, and protein of interest may additionally contain sequences encoding Newcastle Disease Virus matrix (M) protein. In another embodiment, as exemplified in Examples 28-37 herein, sequences encoding Newcastle Disease Virus matrix (M) protein are located on a different vector from the vector that contains sequences encoding the transmembrane domain (TM) protein, cytoplasmic domain (CT) protein, and protein of interest

### IX. Newcastle Disease VLPs

[0585] The invention provides recombinant virus-like particle (VLP) comprising any one of the expression vectors disclosed herein. The invention's VLPs are useful in, for example, eliciting an immune response to a protein expressed on the VLPs. This may be used to immunize a recipient host against the protein. Alternatively, the antibodies that are generated may be used for detection of the protein, such as in ELISA assays.

[0586] In one embodiment, the VLP comprises: a) a Newcastle disease virus matrix (M) protein, b) a transmembrane domain (TM) protein, c) a Newcastle Disease Virus cytoplasmic domain (CT) protein, and d) a protein of interest, wherein said TM protein is flanked by said CT protein and said protein of interest.

[0587] In one embodiment, the virus-like particle (VLP) is purified. The terms “purified” and “isolated” and grammatical equivalents thereof as used herein, refer to the reduction in the amount of at least one undesirable contaminant (such as protein and/or nucleic acid sequence) from a sample. Thus, purification results in an “enrichment,” i.e., an increase in the amount of a desirable composition, such as VLP, protein and/or nucleic acid sequence in the sample.

[0588] In one embodiment, the invention's VLPs express the protein of interest on the outside surface of the virus-like particle (VLP), thereby making the protein available for eliciting an immune response upon introduction of the VLP into a host.

[0589] Methods for determining that proteins are expressed on the outer surface of a VLP are exemplified by those described herein, Example 30 and FIG. 165, for biotinylation of cell surface proteins that are expressed by cells that harbor constructs for VLP expression (McGinnes et al. (2006) J. Virol. 80:2894-2903). In addition, expression of the protein of interest on the outer surface of VLPs may also be determined by using the VLPs to produce antibodies, such as in an animal, egg cell, or tissue culture. The production of an antibody that specifically binds to the protein of interest indicates that the protein of interest is expressed on the outside surface of the VLP.

[0590] In one embodiment, the virus-like particles (VLPs) of the invention are comprised in a vaccine. The term “vaccine” refers to a preparation that may be administered to a host to induce a cellular and/or antibody immune response. Vaccines may contain pharmaceutically acceptable carriers, diluents or excipients. Data herein shows that exemplary VLPs of the invention elicited a soluble antibody response as well as increased CTL activity (see for example, Example 35).

[0591] In one embodiment, the efficiency of producing the invention's virus-like particles (VLPs) is at least 10 fold greater, at least 20 fold greater, and/or at least 30 fold greater than the efficiency of producing influenza virus-like particles (VLPs). In one embodiment, the efficiency of producing the virus-like particles (VLPs) is from 30 to 100 fold greater than the efficiency of producing influenza virus-like particles (VLPs). Data in Example 28 and FIG. 163 demonstrate the surprising result that ND VLP release was approximately 30 to 100 fold higher over a 24 hour period than that of influenza VLPs.

[0592] The term “efficiency” when in reference to production of VLPs by a cell refers to the number of VLPs produced by a cell, such as following expression of an expression vector by those cells. The number of VLPs may be determined directly or indirectly by, for example, quantifying the amount of protein expressed in the VLPs, such as NDV matrix (M) protein, influenza matrix (M1) protein, and NDV heamagglutinin-neuraminidase (HN) protein.

[0593] In one embodiment, the virus-like particle (VLP) is immunogenic. The term “immunogenic” refers to a molecule that is capable of eliciting an immune response in a host animal, including producing an antibody response and/or a cell mediated immune response (for example, involving cytotoxic T lymphocytes (CTL)).

[0594] Exemplary host animals include, without limitation, mammals, avians, amphibians, reptiles, and insects. Data herein shows the use of exemplary mice as recipients of the invention's exemplary VLPs (see for example, Examples 34-35).

[0595] In one embodiment, the immune response comprises production of an antibody that specifically binds to the protein of interest that is expressed on the VLP. The terms “specific binding” or “specifically binding” when used in reference to the interaction of an antibody or cell (such as a lymphocyte cell) with another molecule (such as a protein or peptide), means that the interaction is dependent upon the presence of a particular structure (i.e., the antigenic determinant or epitope) on the molecule. For example, if an antibody is specific for epitope “A,” the presence of a protein containing epitope A (or free, unlabelled A) in a reaction containing labeled “A” and the antibody will reduce the amount of labeled A that is bound to the antibody. Similarly, if a lymphocyte cell is specific for epitope “A,” the presence of a protein containing epitope A (or free, unlabelled A) in a reaction containing labeled “A” and the lymphocyte cell will reduce the amount of labeled A that is bound to the lymphocyte cell.

[0596] Data herein demonstrates that the invention's exemplary VLPs produced an antibody response against the exemplary NDV glycoproteins (see for example, Example 35, FIG. 173).

[0597] In another embodiment, the immune response comprises increasing the number of T lymphocytes that specifically bind to the protein of interest. The term “T lymphocytes” includes, but is not limited to, one or more of cytotoxic T cells (CTLs), helper T cells, and suppressor T cells. T lymphocytes express receptors that recognize antigen in the form of peptide fragments complexed with MHC molecules.

[0598] The terms “increase,” “elevate,” “raise,” and grammatical equivalents (including “higher,” “greater,” etc.) when in reference to the level of any molecule (e.g., VLP, amino acid sequence, nucleic acid sequence, etc.) and/or phenomenon (e.g., immune response, binding to a molecule, efficiency of expression of a nucleic acid sequence, etc.) in a first sample relative to a second sample, mean that the quantity of the molecule and/or phenomenon in the first sample is higher than in the second sample by any amount that is statistically significant using any art-accepted statistical method of analysis. In one embodiment, the quantity of the molecule and/or phenomenon in the first sample is at least 10% greater than, at least 25% greater than, at least 50% greater than, at least 75% greater than, and/or at least 90% greater than the quantity of the same molecule and/or phenomenon in a second sample.

[0599] The terms “reduce,” “inhibit,” “diminish,” “suppress,” “decrease,” and grammatical equivalents (including “lower,” “smaller,” etc.) when in reference to the level of any molecule (e.g., VLP, amino acid sequence, nucleic acid sequence, etc.) and/or phenomenon (e.g., immune response, binding to a molecule, efficiency of expression of a nucleic acid sequence, etc.) in a first sample relative to a second sample, mean that the quantity of molecule and/or phenomenon in the first sample is lower than in the second sample by any amount that is statistically significant using any art-accepted statistical method of analysis. In one embodiment, the quantity of the molecule and/or phenomenon in the first sample is at least 10% lower than, at least 25% lower than, at least 50% lower than, at least 75% lower than, and/or at least 90% lower than the quantity of the same molecule and/or phenomenon in a second sample.

[0600] Data herein demonstrates an increase in CTL activity against NDV proteins after immunization with the invention's exemplary VLPs that contain NDV proteins (see for example, Example 39, FIG. 175). Data herein further demonstrate that in response to immunization with the invention's exemplary VLPs that express influenza virus proteins, there was an increase in the percentage of CD8+ spleen cells that were positive for Interferon γ and an increase in the percentage of CD4+ spleen cells that were positive for Interferon γ (see for example, Example 39, FIG. 176).

### EXPERIMENTAL

[0601] The following examples are only illustrative of specific embodiments of the present invention and are not intended as limiting.

### Example 1

### Cell Cultures

[0602] This example describes the cell cultures used in the Examples below to construct specific embodiments of the present invention.

[0603] A spontaneously transformed fibroblast cell line derived from the East Lansing strain (ELL-O) of chicken embryos (UMNSAH/DF-1) was obtained from the American Type Culture Collection and maintained in Dulbecco's modified Eagle medium (DMEM) supplemented with penicillin-streptomycin and 10% fetal calf serum (FCS).

[0604] Human renal epithelial cells expressing the SV 40 T antigen (293T) were also propagated in DMEM supplemented with 10% FCS, penicillin-streptomycin, vitamins, non-essential amino acids, and glutamine. NDV, strain A V, was propagated in embryonated chicken eggs by standard protocols.

### Example 2

### Plasmids

[0605] This example describes the types of plasmids used in the Examples below to construct various embodiments of the present invention.

[0606] NDV cDNA sequences encoding NP (i.e., for example, SEQ ID NO:23), M (i.e., for example, SEQ ID NO:27), HN (i.e., for example, SEQ ID NO:18), and uncleaved F (i.e., for example, SEQ ID NO:20 or, alternatively, an F-K115Q) proteins were subcloned into the expression vector pCAGGS to generate pCAGGS-NP, pCAGGS-M, pCAGGS-HN and pCAGGS-F-K115Q, respectively. Miyazaki et al., “Expression vector system based on the chicken beta-actin promoter directs efficient production of interleukin-5” Gene 79:269-77 (1989); and Niwa et al., “Efficient selection for high-expression transfectants with a NDVel eukaryotic vector” Gene 108:193-9 (1991).

[0607] F protein cDNA contains a point mutation in the cleavage site sequence, F-KI15Q, which eliminates the furin recognition site. Li et al., “Effect of cleavage mutants on syncytium formation directed by the wild-type fusion protein of Newcastle disease virus” J. Virol. 72:3789-95 (1998).

[0608] pBJ5 expression vector containing the gene encoding a Flag-tagged Vps4A with E228Q mutation and pDsRed2-N1 vector (Clontech) containing the gene encoding the CHMP3-RFP fusion protein were previously described. Strack et al., “PIP1/ALIX is a binding partner for HIV-1p6 and EIAV p9 functioning in virus budding” Cell 114:689-699 (2003).

### Example 3

### Transfection Infection, and Metabolic Labeling

[0609] This examples describes the basic techniques used to develop and express various embodiments of the present invention.

[0610] Transfections of sub-confluent ELL-O cells and/or 293T cells were accomplished using Lipofectamine (Invitrogen) as recommended by the manufacturer. The following amounts of plasmid DNA were used per 35 mm dish: 1.0 μg pCAGGS-NP, 1.0 μg pCAGGS-M, 0.75 μg pCAGGS-F-KI15Q, and 1.0 μg pCAGGS-HN, either alone or in mixtures. These amounts were previously determined to yield levels of expression similar to cells infected with NDV at a multiplicity of infection of 5.

[0611] A total of 3.75 μg of plasmid DNA per 35 mm plate was used in all transfection experiments. When only one, two, or three cDNAs were used, the total amount of transfected DNA was kept constant by adding vector pCAGGS DNA. For each transfection, a mixture of DNA and 5 μl of Lipofectamine in OptiMEM media (Gibco/Invitrogen) was incubated at room temperature for 45 minutes, and added to cells previously washed with OptiMEM. The cells were incubated for 5 hours, the Lipofectamine-DNA complexes were removed, and 2 ml of supplemented DMEM was added.

[0612] After 36 hours, the medium was replaced with 0.7 ml DMEM without cysteine and methionine and supplemented with 100 μCi of ³⁵S-methionine and ³⁵S-cysteine mixture (NEG-772 EASYTAG™ Express Protein Labeling Mix, ³⁵S, Perkin Elmer Life Sciences Inc.). After 4 hours of pulse label, one set of transfected plates was lysed, while in another set the medium was replaced with 1.0 ml of supplemented DMEM with 0.1 mM cold methionine (Nutritional Biochemicals Corporation). After 8 hours of chase, the medium was collected and the cells were lysed in 0.5 ml lysis buffer containing Triton-DOC (1% Triton, 1% sodium deoxycholate) and 25 mg N-ethylmaleimide (NEM). Cells were harvested with a cell scraper and homogenized by passing through a 26 gauge needle 10 to 15 times.

[0613] Sub-confluent 293T cells were simultaneously transfected with pCAGGS-M and different concentrations of either pBJ5-Vps4-E228Q-Flag or pDsRed2-NI-CHMP3. Corresponding empty vectors were used as control. Cells were incubated for 36 hours and the same pulse-chase protocol was performed as described above.

[0614] ELL-O cells were infected at an MOI of 5 pfu for 5 hours, labeled with ³⁵S-methionine and ³⁵S-cysteine mixture for 30 min, and chased in nonradioactive medium for 8 hours as described above. Cell supernatant was harvested and virions purified as described below. Cells were lysed and homogenized as described above.

### Example 4

### VLP Purification and Isolation

[0615] Virus and VLP, as well as virions, were purified from cell supernatants in protocols previously reported. Levinson et al., “Radiation studies of avian tumor viruses and Newcastle disease virus” Virology 28:533-542 (1966). The cell supernatants were centrifuged at 5000 rpm for 5 min at 4° C., overlaid on top of a block gradient consisting of 3.5 ml 20% and 0.5 ml 65% sucrose solutions in TNE buffer (25 mM Tris-HCl pH 7.4, 150 mM NaCl, 5 mM EDTA), and re-centrifuged at 40,000 rpm for 12 hours at 4° C. using a SW50.1 rotor (Beckman). The sucrose gradient interface (containing concentrated particles) was collected in 0.5 ml, mixed with 2.0 ml of 80% sucrose, and overlaid on top of 1.0 ml 80% sucrose cushion. Additional layers of sucrose (1.0 ml of 50% and 0.5 ml of 10% sucrose) were layered on top of the sample. The gradient was centrifuged at 38,000 rpm for 20 h at 4° C. The gradient was collected from the bottom into one 1 ml fraction and eight 0.5 ml fractions using a polystaltic pump. Densities of each fraction were determined using a refractometer. VLPs derived from expression of all combinations of proteins were prepared in a single experiment, thus enabling direct comparison of results.

[0616] The experiments were repeated three times. Immunoprecipitation and polyacrylamide gel electrophoresis. Immunoprecipitation was accomplished by combining one volume of cell lysate or sucrose gradient fraction with two volumes of TNE buffer. Samples were incubated with specific antibodies for 16 hours at 4° C. Antisera used to precipitate NP, F and HN were rabbit polyclonal antibody raised against UV inactivated NDV by standard protocols; anti-HRI and anti-HR2 McGinnes et al., “Newcastle disease virus HN protein alters the conformation of the F protein at cell surfaces” J. Virol. 76:12622-33 (2002); anti-F2-96 and anti-A. McGinnes et al., “Role of carbohydrate processing and calnexin binding in the folding and activity of the HN protein of Newcastle disease virus” Virus Res 53:175-85 (1998).

[0617] Anti-F2-96 was raised against a glutathione S-transferase (GST) fusion protein that contained the F protein sequences from amino acid 96 to 117. Antiserum used to precipitate M protein was a mouse monoclonal antibody raised against purified M protein. Faeberg et al., “Strain variation and nuclear association of 20 NDV Matrix protein” J Virol. 62:586-593 (1988). Immune complexes (ICs) were adsorbed to Protein A (Pansorbin Cells, CALBIOCHEM) for 2 hours at 4° C., pelleted, and then washed three times in immunoprecipitation (IP) wash buffer (phosphate buffer saline (PBS) containing 0.5% 9 Tween-20 and 0.4% sodium dodecyl sulfate (SDS). ICs were resuspended in SDS-polyacrylamide gel electrophoresis sample buffer (125 mM Tris-HCl [pH 6.8], 2% SDS, 10% glycerol, 0.4% Bromphenol blue) with 1 M J3 mercaptoethanol (BME) and boiled.

[0618] Proteins were separated in 8% polyacrylamide-SDS gel and detected by autoradiography. Quantification of resulting autoradiographs was accomplished using a Fluor-STM MultiImager (BioRad).

### Example 5

### High Efficiency VLP Release

[0619] Co-expression of NP, M, F and HN proteins resulted in the release of VLPs with a density of 1.19 to 1.16 g/cc (FIG. 1, panel A). Virus particles purified in parallel from NDV, strain AV, infected cells had a density of 1.21 to 1.19 g/cc (FIG. 1, panel B). Although it is not necessary to understand the mechanism of an invention, it is believed that the slightly lighter density of VLPs compared to authentic virus is likely due to the absence of the virion RNA within the VLPs. The efficiencies of VLP and virus release were calculated as the percentage of M protein remaining in the cell extracts after the chase relative to the amount of protein in the pulse. The loss of M protein from cells in the chase portion of the experiment is due to release from cells as VLPs or virions. By this criterion, the efficiency of VLP release was 85%, while the efficiency of NDV release was 92% (FIG. 1, panel C). The results show that release of VLPs is almost as efficient as release of virions.

[0620] These results demonstrate that NDV VLPs are efficiently assembled and released from avian cells expressing the four major structural proteins. In one embodiment, M protein is sufficient for VLP release. Minimum protein requirements for VLP formation, were determined by individually assessing the capability of each protein to direct particle release. Cells expressing each of the viral proteins individually were radioactively labeled in a pulse-chase protocol and VLPs were isolated as described above.

### Example 6

### M Protein Dependent VLP Release

[0621] VLPs are released only from cells expressing the M protein. FIG. 2, Panel B. Almost no M protein is detectable in cell extracts after the 8 hour chase. FIG. 2A, right panel. Although it is not necessary to understand the mechanism of an invention, it is believed that this indicates that much of the pulse-labeled protein was released from cells. It is further believed that by comparing the levels of M protein in the pulse labeled extract and the chase extract, the efficiency of release was calculated to be 90%.

[0622] In contrast, most of the pulse labeled NP, F and HN proteins remained in extracts after the chase (FIG. 2A). Significant amounts of VLPs were also not detected in the corresponding cell supernatant (FIG. 2, panel B) although there was a trace of very light density material released from HN protein expressing cells. FIG. 2, panel C, shows the quantification of VLPs produced from cells expressing each protein individually. Interestingly, the amount of M protein-containing particles from cells expressing M protein alone was greater than when all four structural proteins were expressed. However, the M protein-only VLPs had a very heterogeneous density, with values ranging from 1.23 to 1.12 g/cc (FIG. 2, panel B). These results reveal that M protein is sufficient for the release of particles.

### Example 7

### M Protein Dependent VLP Release: Pair Wise Combinations

[0623] As shown in Example 6, M protein is required for VLP release. To determine the contribution of NP, F or HN proteins to M protein-driven VLP formation, VLPs from cells expressing all possible combinations of two proteins were isolated and characterized as described above. Cells expressing any combination of proteins without M protein did not release VLPs (FIG. 3; panel C). Furthermore, in the absence of M protein, NP, F and HN proteins expressed in pair wise combinations were retained in cell extracts after the 8 hour chase (FIG. 3A). This finding suggests that M protein is required for particle release. Pair wise expression of NP, F, or HN proteins with M protein resulted in the release of VLPs containing both proteins (FIG. 3, panel B). Intriguingly, however, there was only trace amounts of NP, F or HN proteins and M protein was the predominant protein in the VLPs (FIG. 3, panel B).

[0624] The distribution of NP, F, or HN proteins in the gradients was identical to that of M protein (FIG. 3, panel B). In addition, the VLP densities were very heterogeneous and were much like that of M protein-only VLPs. Surprisingly also, the amount of M protein containing VLPs was significantly decreased (by about 2 to 2.5 fold) upon co-expression of M protein with either NP, F, or HN proteins (FIG. 3, panel C). These results suggest that NP, F, or HN proteins can individually suppress M protein-driven VLP release.

### Example 8

### M Protein Dependent VLP Protein Incorporation

[0625] Efficient incorporation of other viral proteins into VLPs requires the expression of M protein and at least two of the other proteins. To examine the effects of expression of three viral proteins on particle release, cells were transfected with all possible combinations of three cDNAs. Again, VLPs were only released from cells expressing M protein. Expression of NP, F, and HN proteins without the M protein did not result in the release of any particles (FIG. 4, panel C). This finding further strengthens our conclusion that the M protein is required for release of VLPs.

[0626] In contrast to the expression of a single glycoprotein with the M protein, co-expression of both F and HN glycoproteins with M protein resulted in significantly increased incorporation of both glycoproteins into VLPs (FIG. 4, panels B and C). The F and HN proteins were detected in the same gradient fractions as M protein. Furthermore, the densities of the VLPs were more homogenous compared to those generated from cells expressing M protein alone (compare FIG. 4, panel B and FIG. 2, panel B) or M protein with a single glycoprotein. These results indicate that expression of both F and HN proteins with M protein is necessary for efficient incorporation of either glycoprotein into particles.

[0627] Expression of M protein with NP and either F or HN protein resulted in increased incorporation of NP as well as the glycoprotein into VLPs (FIG. 4, panels B and C). The distribution of NP protein-containing particles in the gradient was similar to that of VLPs released from cells expressing all four structural proteins (compare FIG. 1, panel A and FIG. 4, panel B). Importantly, the densities of these particles were more homogenous compared to particles released from cells expressing M alone, and were analogous to the density of the authentic virus or complete VLPs (compare FIG. 4, panel B, and FIG. 1, panel B). Overall, these results indicate that M protein is necessary and sufficient for particle release and that expression of M protein with at least two other proteins is required for efficient incorporation of other proteins into VLPs.

### Example 9

### VLP Release Inhibition

[0628] Host cell VPS pathway is involved in VLP formation and release. Previous studies have implicated the VPS pathway in budding of other enveloped RNA viruses. Demirov et al., “Retrovirus budding” Virus Res 106:87-102 (2004); Pornillos et al., “Mechanisms of enveloped RNA virus budding” Trends Cell Biol. 12:569-79 (2002); and Morita et al., “Retrovirus budding” Annu Rev Cell Dev Biol. 20:395-425 (2004). This pathway might be involved in M protein-driven VLP release because CHMP3 is a subunit of the ESCRT III complex. von Schwedler et al., “The protein network of HIV budding” Cell 4:701-13 (2003).

[0629] Fusion of CHMP3 with RFP transforms it into a dominant-negative protein which inhibits HIV-1 gag VLP release. Strack et al., “PIP1/ALIX is a binding partner for HIV-1p6 and EIAV p9 functioning in virus budding” Cell 114:689-699 (2003). Simultaneous expression of the M protein with CHMP3-RFP resulted in 98.5% inhibition of VLP release (FIG. 5, panels A and C). Expression of another dominant-negative component of the VPS pathway, Vps4A-E228Q with M protein, yielded the same result, with 96.2% inhibition (FIG. 5, panels B and D). Expression of both dominant-negative CHMP3 and Vps4A did not suppress the expression of M protein (FIG. 5, panels E and F). Thus an intact host cell VPS pathway is essential for M protein VLP release.

### Example 10

### Cell Type Dependent Effects on Virus and VLP Release

[0630] This example provides exemplary data showing that VLP release is dependent upon the host cell type. Host cell type affects basic VLP release mechanisms as well as overall VLP release efficiencies.

[0631] Basic Release Mechanisms

[0632] VLP release from avian cells (ELL-0) was compared with VLP release from primate cells (COS-7 cells). To compare virus particle release from these cells, equal numbers of avian cells and COS-7 cells were infected with NDV at an MOI=5. The cells were radioactively labeled in a pulse and then subjected to a nonradioactive chase. Virions were harvested from the cell supernatant at various times during the chase and the proteins in the virus particles resolved by polyacrylamide gel electrophoresis.

[0633] An autoradiograph of the NP and F proteins in virus particles at different times of chase are shown in FIG. 14A and FIG. 14B, respectively (top gel: avian; bottom gel: COS-7). A quantification of the levels of each protein is shown in FIG. 15A and FIG. 15B, respectively. Clearly, the amounts of virus released from avian cells were higher than amounts released from COS-7 cells and the rate of release from avian cells was faster than the rate of release from COS-7 cells. This difference between avian and primate cells was not due to differences in the levels of protein expression in the two cell types. The levels of total viral proteins made during the pulse label were higher in COS-7 cells than avian cells (not shown), a result that suggests that virus entry, replication and translation were at least as efficient in COS-7 as in avian cells.

[0634] These data show that the rate of virus particle release is faster in avian cells than primate cells and the amounts of virus released from avian cells are significantly higher than amounts released from primate cells.

[0635] Release Efficiencies

[0636] To determine if avian cells were also more efficient in the release of VLPs, equal numbers of avian cells and COS-7 cells were transfected with cDNAs encoding the NP, M, HN, and F-K115Q proteins of NDV. Cells were radioactively labeled for four (4) hours (i.e., pulsed) and then subjected to a non-radioactive incubation for eight (8) hours (i.e., chased). VLPs were subsequently isolated from the cell supernatant. VLPs in the supernatants were purified by flotation into sucrose gradients.

[0637] Sucrose gradients were generated that contain VLPs released from avian cells and COS-7 cells, respectively. See FIGS. 16A and 16B, respectively. Clearly, the data show that more VLPs were released from avian cells than from COS-7 cells.

[0638] Cell lysate extracts from avian cell and COS-7 cells were prepared after the pulse-label and after the nonradioactive chase. See FIGS. 17A and 17B, respectively. Importantly, the HN, F, and M proteins were no longer present in avian cell extracts after the nonradioactive chase. This observation is consistent with a more efficient release from avian cells and/or incorporation into VLPs. Conversely, significant levels of these viral proteins remained in the COS-7 cell extracts. This observation is consistent with viral protein retention in COS-7 cells and a lower release of the viral proteins into particles. Clearly, the data demonstrate that VLP release is more efficient from avian cells than from COS-7 cells.

### Example 11

### Comparison of Specific Viral Protein-Induced VLP Release

[0639] This example demonstrates that VLPs are also more efficiently released from avian cells when transfected with NDV containing only an M protein.

[0640] VLP particle release was determined from cells transfected with only M protein cDNA as described above. A sucrose density gradient purification of M protein VLPs were generated from both avian and COS-7 primate cells. See FIG. 18A and FIG. 18 B, respectively. Clearly, the amounts of VLP M proteins released from avian cells were significantly higher, and therefore more efficient, than VLP M proteins released from primate cells.

[0641] Further, equal numbers of cells were transfected with either NP protein cDNA, M protein cDNA, F-K115Q protein cDNA, or HN protein cDNA alone. Alternatively, the experiment used cells transfected with a vector having all four (4) viral protein cDNAs in combination. VLPs were then prepared as described above. A sucrose gradient purification was generated for each transfection and particle release was determined by densitometry. When the various viral protein cDNAs were transfected individually, only M protein resulted in any VLP viral protein release (i.e., only M protein). When a cell was transfected with all four proteins, VLP viral protein release contained all four proteins. In both cases, released VLPs contained greater amounts of viral proteins in avian cells versus COS-7 cells. See FIG. 19A and FIG. 19B, respectively. Clearly, release efficiency of both M protein VLPs and complete VLPs is better from avian cells than COS-7 cells.

### Example 12

### Generation of Antibodies to VLP Viral Vaccines

### I. Monoclonal Antibodies

[0642] Balb/c mice are immunized with multiple I.P. inoculations of a KLH conjugated NDV viral peptide. Splenocytes from immunized animals are then fused with the mouse myeloma AG8 using standard protocols. Wunderlich et al., J. Immunol. Methods 147:1-11 (1992). Supernatants from resultant hybridomas are then screened for immunoreactivity to an ovalbumin-coupled NDV viral peptide using standard ELISA protocols known in the art. Hybridomas positive for the expression of immunoreactive MAbs are cloned at least twice by limiting dilution and MAb isotype analysis performed. Purified MAb IgG will be prepared from ascites fluid using protein-A affinity chromatography. After fusion, screening will show a plurality of positive parental signals, from which monoclonal antibody producing clones may be prepared.

[0643] Immunoprecipitation/Scintillation Assay for Hybridoma Screening

[0644] To develop and screen for monoclonal antibodies which recognize the VLP viral protein in solution rather, than when attached to a solid phase, an assay will be developed in which immunoprecipitation of an ³⁵S-methionine-labeled in vitro-translated VLP viral protein is measured. A standard amount of in vitro translated VLP viral protein is allowed to form antibody/antigen complexes in a solution which can be optimized for ionic strength, pH, and detergent composition. After the immune complexes are precipitated with Protein G (Omnisorb cells) and washed extensively, bound radioactivity is counted in a liquid scintillation counter; background is subtracted and the efficiency of precipitation calculated. This Immunoprecipitation/Scintillation assay (IPSA) allows for both the rapid identification and characterization of antibodies, and will be used to test a variety of monoclonal VLP viral protein antibodies. The assay is applicable, in general, to monoclonal hybridoma supernatants as well as polyclonal sera to identify antibodies which can be used for immunoprecipitations.

[0645] Briefly, approximately 1.5×10⁵ DPMs of ³⁵S-methionine-labeled in vitro-translated VLP viral proteins are added to 10 μl of a 10× immunoprecipitation buffer (150 mM NaCl, 10% NP-40, 5% deoxycholic acid, 1% SDS, 500 mM Tris pH 8). To this, 90 μl of monoclonal cell supernatant from the monoclonal fusion of interest is added and allowed to react for 2 hrs at 4° C. After 2 hrs, 40 μl of a 10% solution of Omnisorb cells (Calbiochem) equilibrated in 1× immunoprecipitation buffer (RIPA buffer; 150 mM NaCl, 1% NP-40, 0.5% deoxycholic acid, 0.1% SDS, 50 mM Tris pH8) is added and allowed to react for an additional 2 hrs at 4° C. with rocking. The cells are pelleted by centrifugation for 5 min at 4500 g and 4° C., and washed 3× with 800 μl cold 1× immunoprecipitation buffer. Pellets were quantitatively transferred to scintillation vials and counted in a Beckman LS6000 scintillation counter in the Auto DPM mode. The percentage of VLP viral protein immunoprecipitated may then be calculated.

[0646] Characterization of VLP Viral Protein MAbs

[0647] To further characterize a best cell line, a competition immunoprecipitation/scintillation assay (Competition IPSA) may be performed. In this variation, a clone producing monoclonal antibodies to a VLP viral protein was added to an approximate 200 fold molar excess of unlabelled competitor peptide at the same time as labeled in vitro translated VLP viral protein. As expected, peptides to the suspected epitope regions will be compared with peptides that are not suspected of representing the epitope regions. A high percentage of competition in assays containing the suspected epitope regions will verify the VLP viral protein monoclonal antibody binding specificity.

### II. Antisera

[0648] Antisera used to precipitate viral proteins were a cocktail of anti-NDV antibodies. Antiserum used to precipitate NP was rabbit polyclonal antibody raised against UV inactivated NDV by standard protocols. Antisera used to precipitate F protein were raised against glutathione S-transferase (GST) fusion proteins that contained amino acid sequences 130 to 173 (anti-HR1) (McGinnes et al., “Newcastle disease virus HN protein alters the conformation of the F protein at cell surfaces” J. Virol. 76:12622-12633 (2002).), 470 to 500 (anti-HR2) (Dolganiuc et al., “Role of the cytoplasmic domain of the Newcastle disease virus fusion protein in association with lipid rafts” J Virol 77:12968-12979 (2003)), or 96 to 117 (anti-F₂-96). Antiserum used to precipitate HN protein was raised against HN protein sequences from amino acid 96 to 117 (anti-A) (McGinnes et al., “Role of carbohydrate processing and calnexin binding in the folding and activity of the HN protein of Newcastle disease virus” Virus Res 53:175-185 (1998)). Antiserum used to precipitate M protein was a mouse monoclonal antibody raised against purified M protein (Faeberg et al., “Strain variation and nuclear association of NDV Matrix protein” J. Virol. 62:586-593 (1988)). Antibody used to precipitate HA-tagged proteins was a mouse monoclonal HA antibody conjugated to agarose beads (Sigma). Secondary antibody used for immunoblotting was a peroxidase conjugated mouse monoclonal anti-HA antibody (Sigma).

### Example 13

### Construction of Recombinant Baculovirus Vectors

[0649] This example describes a general methodology from the construction of recombinant baculovirus vectors.

[0650] A general scheme for constructing baculovirus recombinants is shown in FIG. 28. As a first step, the target gene (i.e., for example, an NDV particle protein), shown as a PCR-derived DNA, is cloned downstream of a copy of an AcNPV promoter in a suitable plasmid transfer vector (i.e., for example, pBAC4x-1). The transfer vector has upstream and downstream segments of baculovirus DNA flanking the promoter and target gene.

[0651] A selected clone of the derived recombinant transfer vector is grown in a bacterial cell culture (i.e., for example, E. coli), avian cell culture (i.e., for example, ELL-O), or a human cell culture (i.e., for example, 293T) and the resulting recombinant plasmid DNA is characterized and purified.

[0652] In the second step, the purified recombinant transfer plasmid is co-transfected with linearized virus DNA into insect cells (i.e., for example, Sf9) to construct the recombinant baculovirus. The flanking regions of the transfer vector participate in homologous recombination with the virus DNA sequences during virus replication and introduce the target gene into the baculovirus genome at a specific locus (usually polyhedrin or p10, depending on the transfer plasmid).

[0653] Following transfection and plaque purification to remove parental virus, a high titer virus stock is prepared from the appropriate recombinant. Once a high titer virus stock is obtained, it is employed to determine the optimal times for target protein expression (depending on the promoter and the properties of the gene product). After these parameters are established, a large scale culture is prepared and used for protein production.

### Example 14

### Production of Measles VLP Vaccine

[0654] This example presents a protocol that will result in the production of VLP vaccines specific for the measles virus.

Vectors: MV cDNA sequences encoding NP (i.e., for example, SEQ ID NO:42), M (i.e., for example, SEQ ID NO:48), HA (i.e., for example, SEQ ID NO:30), and uncleaved F (i.e., for example, SEQ ID NO:36) proteins will be subcloned into the expression vector pCAGGS to generate pCAGGS-NP, pCAGGS-M, pCAGGS-HA and pCAGGS-F-K111G, respectively. The cDNA encoding the MV F protein will be mutated to eliminate the furin recognition site at amino acid 108-112. The mutation will introduce a glycine in place of lysine at amino acid 111, the position analogous to the K115Q mutation in the NDV F protein. Elimination of cleavage of the F protein will inhibit the ability of the F protein to fuse. Absence of cell-cell fusion in the culture will likely increase the yield of VLPs.
Cell lines: Measles virus is released efficiently from human and primate cell lines but not murine cell lines (Vincent, et al Virology 265: 185). Thus Hela cells (human cervical carcinoma cells), 293 cells (human embryonic kidney cells), VERO cells (African green monkey kidney cells) and COS-7 (primate) cells will be used.
Transfection, infection and metabolic labeling: Transfections of sub confluent cells will be accomplished using Lipofectamine (Invitrogen) as recommended by the manufacturer. The following amounts of plasmid DNA will be used per 35 mm dish: 1.0 μg pCAGGS-NP, 1.0 μg pCAGGS-M, 0.75 μg pCAGGS-F-K111G, and 1.0 μg pCAGGS-HA. A total of 3.75 μg of plasmid DNA per 35 mm plate will be used in all transfection experiments. When only one, two, or three cDNAs are used, the total amount of transfected DNA will be kept constant by adding vector pCAGGS DNA. For each transfection, a mixture of DNA and 5 μl of Lipofectamine in OptiMEM media (Gibco/Invitrogen) will be incubated at room temperature for 45 minutes, and added to cells previously washed with OptiMEM. The cells will be incubated for 5 hours, the Lipofectamine-DNA complexes removed, and 2 ml of supplemented DMEM added. After 36 hours, the medium will be replaced with 0.7 ml DMEM without cysteine and methionine and supplemented with 100 μCi of ³⁵S-methionine and ³⁵S-cysteine mixture (NEG-772 EASYTAG™ Express Protein Labeling Mix, ³⁵S, Perkin Elmer Life Sciences Inc.). After 4 hours of pulse label, one set of transfected plates will be lysed, while in another set the medium will be replaced with 1.0 ml of supplemented DMEM with 0.1 mM cold methionine (Nutritional Biochemicals Corporation). After 8 hours of chase, the cell supernatant will be collected. In addition, the cells will be sonicated to release cell-associated VLPs. The resulting cell supernatants will be combined. The cells will be lysed in 0.5 ml lysis buffer (10 mM NaCl, 1.5 mM MgCl2, 10 mM Tris-HCl pH7.4) containing Triton-DOC (1% Triton, 1% sodium deoxycholate) and 1.25 mg N-ethylmaleimide (NEM). Cells will be harvested with a cell scraper and homogenized by passing through a 26-gauge needle 10 to 15 times.

[0655] To determine if the VPS pathway is involved in VLP budding, sub confluent 293T cells will be simultaneously transfected with pCAGGS-M and different concentrations of either pBJ5-Vps4-E228Q-Flag or pDsRed2-N-1-CHMP3. Corresponding empty vectors will be used as control. Cells will be incubated for 36 hours and the same pulse-chase protocol was performed as described above.

[0656] To generate virus particles for controls, primate or human cells will be infected at an MOI of 5 pfu for 30 hours and labeled with ³⁵S-methionine and ³⁵S-cysteine mixture for 4 hours, and chased in nonradioactive medium for 8 hours as described above. Cell supernatant will be harvested and virions purified as described below. Cells will be lysed and homogenized as described above.

[0657] Virus and VLP purification: VLPs as well as virions will be purified from cell supernatants in protocols previously developed for virus purification. The cell supernatants will be clarified by centrifugation at 5000 rpm for 5 min at 4° C., overlaid on top of a step gradient consisting of 3.5 ml 20% and 0.5 ml 65% sucrose solutions in TNE buffer (25 mM Tris-HCl pH 7.4, 150 mM NaCl, 5 mM EDTA), and centrifuged at 40,000 rpm for 12 hours at 4° C. using a SW50.1 rotor (Beckman). The interface (containing concentrated particles) will be collected in 0.5 ml, mixed with 2.0 ml of 80% sucrose, and overlaid on top of 1.0 ml 80% sucrose cushion. Additional layers of sucrose (1.0 ml of 50% and 0.5 ml of 10% sucrose) will be layered on top of the sample. The gradient will be centrifuged at 38,000 rpm for 20 h at 4° C. The gradient will be collected from the bottom into one 1 ml fraction and eight 0.5 ml fractions using a polystaltic pump. Densities of each fraction will be determined using a refractometer. VLPs derived from expression of all combinations of proteins will be prepared in a single experiment, thus enabling direct comparison of results.

Immunoprecipitation and polyacrylamide gel electrophoresis: Immunoprecipitation will be accomplished by combining one volume of cell lysate or sucrose gradient fraction with two volumes of TNE buffer. Samples were incubated with MV specific polyclonal antibodies for 16 hours at 4° C. Antiserum used to precipitate NP, F and HA will be rabbit polyclonal antibody raised against UV inactivated MV by standard protocols. Immune complexes (ICs) will be adsorbed to Protein A (Pansorbin Cells, CALBIOCHEM) for 2 hours at 4° C., pelleted, and then washed three times in immunoprecipitation (IP) wash buffer (phosphate buffer saline (PBS) containing 0.5% Tween-20 and 0.4% sodium dodecyl sulfate (SDS)). ICs will be resuspended in SDS-polyacrylamide gel electrophoresis sample buffer (125 mM Tris-HCl, pH 6.8, 2% SDS, 10% glycerol, 0.4% Bromphenol blue) with 1 M β-mercaptoethanol (BME) and boiled. Proteins will be separated on 8% polyacrylamide-SDS gel and subjected to autoradiography. Quantification of resulting autoradiographs will be accomplished using a Fluor-S™ MultiImager (BioRad).

### Example 15

### Production of Respiratory Syncytial Virus VLP Vaccine

[0658] This example presents a protocol that will result in the production of VLP vaccines specific for the respiratory syncytial virus (RSV).

Vectors: RSV cDNA sequences encoding NP (i.e., for example, SEQ ID NO:70), M (i.e., for example, SEQ ID NO:66 or, alternatively, M2-1), G (i.e., for example, SEQ ID NO:54), and an uncleaved F (i.e., for example, SEQ ID NO:60) protein will be subcloned into the expression vector pCAGGS to generate pCAGGS-NP, pCAGGS-M2-1, pCAGGS-G and pCAGGS-F-R108N/R109N, respectively. The cDNA encoding the RSV F protein will be mutated to eliminate one of the two furin recognition sites at amino acids 106-109 and 131-136, as previously reported (Gonzalez-Reyes, et al, PNAS 98: 9859). Elimination of cleavage will inhibit the ability of the F protein to fuse. The absence of cell-cell fusion will likely increase the release of VLPs. A double mutation, R108N/R109N, eliminates one cleavage and inhibits the fusion activity of the protein (Gonzalez-Reyes, et al, PNAS 98: 9859). Additional RSV proteins not found in other paramyxoviruses are NS1, NS2, M2-2, and SH, but all have been shown to be nonessential for virus assembly (reviewed in Collins, et al, Respiratory Syncytial Virus, in Fields Virology, Ed. Knipe, D. and Howley, P. Lippincott Williams and Wilkins, 2001). G protein is also nonessential for assembly but likely contributes to a protective immune response to the virus.
Cell lines: RSV grows efficiently in a variety of cell lines from human and animal sources. However, HEp-2 cells (a Hela cell variant) are the most efficient in production of virus (reviewed in Collins, et al, Respiratory Syncytial Virus, in Fields Virology, Ed. Knipe, D. and Howley, P. Lippincott Williams and Wilkins, 2001), thus these cells will be used. A549 cells (type II alveolar epithelial lung carcinoma cells), also reported to be permissive for RSV, will be used as well.
Transfection, infection and metabolic labeling: Transfections of sub confluent cells will be accomplished using Lipofectamine (Invitrogen) as recommended by the manufacturer. The following amounts of plasmid DNA will be used per 35 mm dish: 1.0 μg pCAGGS-NP, 1.0 μg pCAGGS-M2-1, 0.75 μg pCAGGS-F-R108N/R109N, and 1.0 μg pCAGGS-G. A total of 3.75 μg of plasmid DNA per 35 mm plate will be used in all transfection experiments. When only one, two, or three cDNAs are used, the total amount of transfected DNA will be kept constant by adding vector pCAGGS DNA. For each transfection, a mixture of DNA and 5 μl of Lipofectamine in OptiMEM media (Gibco/Invitrogen) will be incubated at room temperature for 45 minutes, and added to cells previously washed with OptiMEM. The cells will be incubated for 5 hours, the Lipofectamine-DNA complexes removed, and 2 ml of supplemented DMEM added. After 36 hours, the medium will be replaced with 0.7 ml DMEM without cysteine and methionine and supplemented with 100 μCi of ³⁵S-methionine and ³⁵S-cysteine mixture (NEG-772 EASYTAG™ Express Protein Labeling Mix, ³⁵S, Perkin Elmer Life Sciences Inc.). After 4 hours of pulse label, one set of transfected plates will be lysed, while in another set the medium will be replaced with 1.0 ml of supplemented DMEM with 0.1 mM cold methionine (Nutritional Biochemicals Corporation). After 8 hours of chase, the medium will be collected. In addition, the cells will sonicated to release cell associated VLPs. The resulting cell supernatants will be combined. The cells will be lysed in 0.5 ml lysis buffer (10 mM NaCl, 1.5 mM MgCl₂, 10 mM Tris-HCl, pH 7.4) containing Triton-DOC (1% Triton, 1% sodium deoxycholate) and 1.25 mg N-ethylmaleimide (NEM). Cells will be harvested with a cell scraper and homogenized by passing through a 26-gauge needle 10 to 15 times.

[0659] To determine if the VPS pathway is involved in VLP budding, sub confluent HEp-2 cells will be simultaneously transfected with pCAGGS-M2-1 and different concentrations of either pBJ5-Vps4-E228Q-Flag or pDsRed2-N1-CHMP3. Corresponding empty vectors will be used as control. Cells will be incubated for 36 hours and the same pulse-chase protocol was performed as described above.

[0660] To generate virus particles for controls, cells will be infected at an MOI of 10 pfu for 30 hours and labeled with ³⁵S-methionine and ³⁵S-cysteine mixture for 4 hours, and chased in nonradioactive medium for 8 hours as described above. Cell supernatant will be harvested and virions purified as described below. Cells will be lysed and homogenized as described above.

Virus and VLP purification: VLPs as well as virions will be purified from cell supernatants in protocols previously developed for virus purification. The cell supernatants will be clarified by centrifugation at 5000 rpm for 5 min at 4° C., overlaid on top of a step gradient consisting of 3.5 ml 20% and 0.5 ml 65% sucrose solutions in TNE buffer (25 mM Tris-HCl pH 7.4, 150 mM NaCl, 5 mM EDTA), and centrifuged at 40,000 rpm for 12 hours at 4° C. using a SW50.1 rotor (Beckman). The interface (containing concentrated particles) will be collected in 0.5 ml, mixed with 2.0 ml of 80% sucrose, and overlaid on top of 1.0 ml 80% sucrose cushion. Additional layers of sucrose (1.0 ml of 50% and 0.5 ml of 10% sucrose) will be layered on top of the sample. The gradient will be centrifuged at 38,000 rpm for 20 h at 4° C. The gradient will be collected from the bottom into one 1 ml fraction and eight 0.5 ml fractions using a polystaltic pump. Densities of each fraction will be determined using a refractometer. VLPs derived from expression of all combinations of proteins will be prepared in a single experiment, thus enabling direct comparison of results.
Immunoprecipitation and polyacrylamide gel electrophoresis: Immunoprecipitation will be accomplished by combining one volume of cell lysate or sucrose gradient fraction with two volumes of TNE buffer. Samples will be incubated with RSV specific polyclonal antibodies for 16 hours at 4° C. Antiserum to be used is commercially available from several sources. Immune complexes (ICs) will be adsorbed to Protein A (Pansorbin Cells, CALBIOCHEM) for 2 hours at 4° C., pelleted, and then washed three times in immunoprecipitation (IP) wash buffer (phosphate buffer saline (PBS) containing 0.5% Tween-20 and 0.4% sodium dodecyl sulfate (SDS)). ICs will be resuspended in SDS-polyacrylamide gel electrophoresis sample buffer (125 mM Tris-HCl, pH 6.8, 2% SDS, 10% glycerol, 0.4% Bromphenol blue) with 1 M β-mercaptoethanol (BME) and boiled. Proteins will be separated on 8% polyacrylamide-SDS gel and subjected to autoradiography. Quantification of resulting autoradiographs will be accomplished using a Fluor-S™ MultiImager (BioRad).

### Example 16

### Production of Parainfluenza 3 VLP Vaccine

[0661] This example presents a protocol that will result in the production of VLP vaccines specific for the parainfluenza 3 (PIV).

Vectors: PIV3 cDNA sequences encoding NP (i.e., for example, SEQ ID NO:76), M (i.e., for example, SEQ ID NO:80), HN (i.e., for example, SEQ ID NO:84), and an uncleaved F (i.e., for example, SEQ ID NO:78) protein will be subcloned into the expression vector pCAGGS to generate pCAGGS-NP, pCAGGS-M, pCAGGS-HN and pCAGGS-F, respectively. The cDNA encoding the PIV3 F protein will be mutated to eliminate the furin recognition site at amino acid 109. The lysine at amino acid 108 will be changed to glycine. Elimination of cleavage will inhibit the ability of the F protein to fuse. The absence of cell-cell fusion will likely increase the release of VLPs.
Cell lines: PIV 3 grows efficiently in a variety of cell lines from human and primate sources. Thus Hela cells (human cervical carcinoma cells), 293 cells (human embryonic kidney cells), VERO cells (African green monkey kidney cells) and COS-7 (primate) cells will be used. (reviewed in Chanock, et al, Parainfluenza Viruses, in Fields Virology, Ed. Knipe, D. and Howley, P. Lippincott Williams and Wilkins, 2001. LLC-MK2 (rhesus kidney cells) and NCI-H292 (human lung carcinoma) cells will also be used as they have been successfully used to generate virus.
Transfection, infection and metabolic labeling: Transfections of sub confluent cells will be accomplished using Lipofectamine (Invitrogen) as recommended by the manufacturer. The following amounts of plasmid DNA will be used per 35 mm dish: 1.0 μg pCAGGS-NP, 1.0 μg pCAGGS-M, 0.75 μg pCAGGS-F-K108G, and 1.0 μg pCAGGS-HN. A total of 3.75 μg of plasmid DNA per 35 mm plate will be used in all transfection experiments. When only one, two, or three cDNAs are used, the total amount of transfected DNA will be kept constant by adding vector pCAGGS DNA. For each transfection, a mixture of DNA and 5 μl of Lipofectamine in OptiMEM media (Gibco/Invitrogen) will be incubated at room temperature for 45 minutes, and added to cells previously washed with OptiMEM. The cells will be incubated for 5 hours, the Lipofectamine-DNA complexes removed, and 2 ml of supplemented DMEM added. After 36 hours, the medium will be replaced with 0.7 ml DMEM without cysteine and methionine and supplemented with 100 μCi of ³⁵S-methionine and ³⁵S-cysteine mixture (NEG-772 EASYTAG™ Express Protein Labeling Mix, ³⁵S, Perkin Elmer Life Sciences Inc.). After 4 hours of pulse label, one set of transfected plates will be lysed, while in another set the medium will be replaced with 1.0 ml of supplemented DMEM with 0.1 mM cold methionine (Nutritional Biochemicals Corporation). After 8 hours of chase, the cell supernatant will be collected. The cells will be lysed in 0.5 ml lysis buffer (10 mM NaCl, 1.5 mM MgCl2, 10 mM Tris-HCl pH7.4) containing Triton-DOC (1% Triton, 1% sodium deoxycholate) and 1.25 mg N-ethylmaleimide (NEM). Cells will be harvested with a cell scraper and homogenized by passing through a 26-gauge needle 10 to 15 times.

[0662] To determine if the VPS pathway is involved in VLP budding, sub confluent HEp-2 cells will be simultaneously transfected with pCAGGS-M and different concentrations of either pBJ5-Vps4-E228Q-Flag or pDsRed2-N1-CHMP3. Corresponding empty vectors will be used as control. Cells will be incubated for 36 hours and the same pulse-chase protocol was performed as described above.

[0663] To generate virus particles for controls, cells will be infected at an MOI of 10 pfu for 30 hours and labeled with ³⁵S-methionine and ³⁵S-cysteine mixture for 4 hours, and chased in nonradioactive medium for 8 hours as described above. Cell supernatant will be harvested and virions purified as described below. Cells will be lysed and homogenized as described above.

Virus and VLP purification: VLPs as well as virions will be purified from cell supernatants in protocols previously developed for virus purification. The cell supernatants will be clarified by centrifugation at 5000 rpm for 5 min at 4° C., overlaid on top of a step gradient consisting of 3.5 ml 20% and 0.5 ml 65% sucrose solutions in TNE buffer (25 mM Tris-HCl pH 7.4, 150 mM NaCl, 5 mM EDTA), and centrifuged at 40,000 rpm for 12 hours at 4° C. using a SW50.1 rotor (Beckman). The interface (containing concentrated particles) will be collected in 0.5 ml, mixed with 2.0 ml of 80% sucrose, and overlaid on top of 1.0 ml 80% sucrose cushion. Additional layers of sucrose (1.0 ml of 50% and 0.5 ml of 10% sucrose) will be layered on top of the sample. The gradient will be centrifuged at 38,000 rpm for 20 h at 4° C. The gradient will be collected from the bottom into one 1 ml fraction and eight 0.5 ml fractions using a polystaltic pump. Densities of each fraction will be determined using a refractometer. VLPs derived from expression of all combinations of proteins will be prepared in a single experiment, thus enabling direct comparison of results.
Immunoprecipitation and polyacrylamide gel electrophoresis: Immunoprecipitation will be accomplished by combining one volume of cell lysate or sucrose gradient fraction with two volumes of TNE buffer. Samples will be incubated with PIV3 specific polyclonal antibodies for 16 hours at 4° C. Antiserum to be used is commercially available from several sources. Immune complexes (ICs) will be adsorbed to Protein A (Pansorbin Cells, CALBIOCHEM) for 2 hours at 4° C., pelleted, and then washed three times in immunoprecipitation (IP) wash buffer (phosphate buffer saline (PBS) containing 0.5% Tween-20 and 0.4% sodium dodecyl sulfate (SDS)). ICs will be resuspended in SDS-polyacrylamide gel electrophoresis sample buffer (125 mM Tris-HCl, pH 6.8, 2% SDS, 10% glycerol, 0.4% Bromphenol blue) with 1 M β-mercaptoethanol (BME) and boiled. Proteins will be separated on 8% polyacrylamide-SDS gel and subjected to autoradiography. Quantification of resulting autoradiographs will be accomplished using a Fluor-S™ MultiImager (BioRad).

### Example 17

### Site-Specific Mutagenesis of Late Domains

[0664] Mutations in the M protein PKSP and YANL sequences at amino acids 216 and 219 and amino acids 232 and 235 were introduced by PCR to yield M-A₂₁₆A₂₁₉ and M-A₂₃₂A₂₃₅, respectively. Specific sited-directed mutagenic primers were designed to substitute the proline residues at positions 216 and 219 and tyrosine and leucine residues at positions 232 and 235, respectively, with alanine. Additional mutant M genes were constructed by substituting PTAP or YPDL sequences for YANL at amino acid positions 232 to 235. The entire genes of each M protein mutant DNA were sequenced to verify that no additional mutation was introduced by the mutagenesis protocol. Mutations generated are illustrated in FIG. 70.

### Example 18

### VLP Release from 293T Cells

[0665] This example evaluates the effects on particle release of available dominant negative mutant human VPS proteins and whether human renal epithelial cells (293T) could support the release of NDV VLPs.

[0666] VLP particles were released from 293T cells expressing M protein alone (top panel) or 293T cells co-expressing NP, M, F-K115Q and HN proteins (bottom panel). FIG. 67, Panel A. Particles released from 293T cells expressing M protein alone were very heterogeneous with respect to density (FIG. 67, panel A, top panel), very similar to particles released from avian cells expressing M protein alone. In contrast, VLPs released from 293T cells expressing all 4 major structural proteins were more homogenous in density. These particles were slightly less dense (1.18 g/cc) than the authentic virus (1.2 g/cc; (Lamb et al., In: Paramyxoviridae: The Viruses and Their Replication, Third edition ed, vol. 1. LippincottWilliams & Wilkins, Philadelphia (2001))) due to absence of genomic RNA.

[0667] These combined results show that M protein VLPs and complete VLPs were released from 293T cells. However, the efficiency of release of particles from 293T cells, as measured by the percentage of pulse labeled M protein remaining in cells after a long nonradioactive chase, was lower than VLP release from avian cells (50% vs. 84%, respectively).

### Example 19

### Dominant Negative VPS Protein Mutants Inhibit Particle Release

[0668] This example was designed to determine if inhibition of particle release was due only to over expression of dominant negative VPS proteins.

[0669] 293T cells were transfected with vector control, wild type CHMP3, wild type Vps4A, wild type AIP1, dominant negative (dn) CHMP3, dn Vps4A, and dn AIP1.

[0670] The wild type forms of each VPS protein had little effect on particle release. M protein particle release was inhibited by dn-CHMP3 to about 90%. (FIG. 68, Panels A and B). Vps4A-E228Q inhibited M protein VLP release by about 90% (FIG. 68, Panels C and D), and AIP-1-RFP inhibited particle release by 90% (FIG. 68, Panels E and F). The dominant negative forms of CHMP3, Vps4A, and AIP1, but not the wild type forms, inhibited the release of VLPs containing all four viral proteins. FIG. 69.

[0671] These combined results show that the inhibition of VLP release was not due to over expression of the VPS protein, but rather due to specific effect of the dn mutant proteins. These results support the conclusion that an intact VPS pathway facilitates M protein particle release.

### Example 20

### YANL Sequence Mutations Inhibit VLP Release

[0672] This example presents data showing that the L domain of an NDV M protein plays a role in particle budding. For example, the sequence of a NDV M protein has two possible L domain sequences, PKSP and YANL, which are similar to the classical L domains PTAP and YPXL, respectively (Freed, E. O., “Mechanisms of enveloped virus release” Virus Res 106:85-86 (2004)). The data below show that by inducing mutations in these L domain sequences, VLP release maybe inhibited.

[0673] The proline residues in the PKSP sequence were substituted with alanine (M-A₂₁₆A₂₁₉); and the tyrosine and leucine in the YANL sequence were substituted with alanine (M-A₂₃₂A₂₃₅) (FIG. 70, Panel A). These mutant M proteins were expressed either individually (FIG. 70, Panel B, extracts) or in combination with NP, F-K115Q and HN proteins (FIG. 70, Panel D, extracts). Particles were released from cells expressing the M-A₂₁₆A₂₁₉ mutant at levels comparable to cells expressing wild type M protein. FIG. 5, Panels B-E.

[0674] In contrast, there was a significant reduction of particles released from cells expressing the M-A₂₃₂A₂₃₅ mutant (FIG. 70, Panel B). Similarly, co-expression M-A₂₃₂A₂₃₅ mutant protein with NP, F-K115Q and HN proteins resulted in 80% reduction in particles released (FIG. 70, Panel D, compare lanes 6 and 8 and Panel E). Amounts of VLPs released from cells co-expressing the M-A₂₁₆A₂₁₉ mutant protein with NP, F-K115Q and HN proteins were comparable to wild type levels (FIG. 70, Panel D, lanes 6 and 7).

[0675] To determine if the inhibition of particle release by mutation of the YANL sequence was due to elimination of L domain activity or defects in conformation of the M protein, the YANL sequence was substituted separately with two known classical L domain sequences, YPDL and PTAP (Morita et al., “Retrovirus budding” Annu Rev Cell Dev Biol 20:395-425 (2004); Strack et al., “AIP1/ALIX is a binding partner for HIV-1 p6 and EIAV p9 functioning in virus budding” Cell 114:689-699 (2003)).

[0676] Both the YPDL and PTAP sequences supported release of the NDV M protein particles. FIG. 705, Panels B & C. The amounts of particles released from NDV M protein containing the substituted YPDL and PTAP motif were comparable to wild type levels. These results strongly indicate that the YANL sequence at position 232 to 235 in the NDV M protein functions as an L domain.

[0677] Retrovirus particles, which have a gag protein with an YPXL L domain, contain AIP1 (Strack et al., “AIP1/ALIX is a binding partner for HIV-1 p6 and EIAV p9 functioning in virus budding” Cell 114:689-699 (2003)) and may represent a polypeptide with an approximate size of 100 kD in the SDS-PAGE gels containing NDV VLP proteins or virion proteins. AIP1 was incorporated into NDV particles and VLPs, thereby co-expressing M protein with an HA-tagged AIP1 at either the N-terminal (HA-AIP1) or the C-terminal (AIP1-HA), or with vector alone. M protein particles were released from both cells expressing M protein with vector and cells expressing M protein and either HA-tagged AIP1. FIG. 71, Panel A. The expression of HA-AIP1 and AIP1-HA were at comparable levels (FIG. 71, panel A, IB extract gel, lanes 2 and 3). However, only AIP1-HA incorporated into VLPs (FIG. 71, panel A, IB VLP gel lane 3). AIP1-HA can also be precipitated from purified disrupted VLPs. FIG. 71, Panel B, right.

[0678] These results demonstrated that AIP1 is incorporated into VLPs and suggest that AIP1 may be interacting directly or indirectly with the M protein in particles.

### Example 21

### Co-Immunoprecipitation

[0679] Purified VLPs were incubated in ice cold TNE buffer (25 mM Tris HCl, pH 7.4, 150 mM NaCl, 5 mM EDTA) containing 1% Triton X-100, 2.5 mg/ml N-ethylmaleimide for 15 minutes. Excess primary antibody was added and VLPs were incubated at 4° C. overnight. Pansorbin cells, blocked overnight in TNE buffer containing 1% Triton X-100 and 5 mg bovine serum albumin (BSA) and then prewashed in TNE containing 1% Triton X-100 and 1 mg/ml BSA, were added in excess as determined in preliminary experiments, and incubation was continued at 4° C. with constant mixing for at least 2 h. Immune complexes were collected by centrifugation (10,000 rpm for 30 seconds in a microcentrifuge) and washed three times in ice-cold TNE containing 0.5% Triton X-100. The pelleted complexes were resuspended in gel sample buffer.

### Example 22

### Protease Protection Assay

[0680] Protease digestion of M protein from avian cell extracts and VLPs was accomplished by adding 0.25, 0.5, 1, 5, 10, and 20 μg of proteinase K per ml of sample and incubating for 30 min on ice. In parallel, VLPs were also made 0.5% with respect to Triton X-100 prior to incubation with proteinase K. After digestion, phenylmethylsulfonyl fluoride (PMSF) (0.1 M) was added. For subsequent immunoprecipitation, the reaction mixtures were made 1% with respect to Triton X-100 and 0.5% with respect to sodium deoxycholate.

### Example 23

### Immunofluorescence Microscopy

[0681] Avian cells, grown in 35 mm dish containing glass coverslips, were transfected with different combinations of NDV cDNAs as described above. After 40 hours, nuclei were stained with 5 μg/ml 4′,6-Diamidino-2-phenylindole (DAPI) for 30 min at 37° C. Cells were washed twice with ice-cold immunofluoresecence (IF) buffer (PBS containing 1% bovine serum albumin, 0.02% sodium azide, and 5 mM CaCl₂), fixed with 2% paraformaldehyde, blocked with IF buffer for 2 hours, and incubated for 1 hour at 4° C. in IF buffer containing polyclonal antibodies against HN and F proteins.

[0682] Cells were washed twice with ice-cold IF buffer, permeabilized with 0.05% Triton X-100, blocked with IF buffer for at least 2 hours and incubated for 1 hour at 4° C. in IF buffer containing purified ascites fluids containing anti-M protein monoclonal antibody (52-E5). Cells were then washed twice with ice-cold buffer followed by incubation for 1 hour at 4° C. in IF buffer containing fluorescein conjugated goat anti-rabbit IgG (Alexa® 488; Molecular Probes) and rhodamine conjugated goat anti-mouse IgG (Alexa® 568; Molecular Probes) secondary antibodies. Cells were washed with ice-cold IF buffer, mounted onto slides using a mounting medium (Vectashield®, Vector Labs, Inc) for immunofluorescence microscopy. Fluorescence images were acquired using a Nikon fluorescence microscope and Openlab® software and processed using Adobe Photoshop®.

### Example 24

### Membrane Associated M Protein

[0683] This example provides data confirming sucrose gradient data suggesting that M protein may be associated with membranes by incubation with a protease.

[0684] VLPs and cell extracts were either left untreated (FIG. 62, lane 1) or treated with different concentrations of Proteinase K (lanes 2 to 7). As expected, the M protein in cell extracts was sensitive to low concentrations of protease (FIG. 62 upper panel). The lower band below the M protein is a protease digestion product indicating that M protein has a protease resistant core. However, M proteins in VLPs were largely protected from protease digestion (FIG. 62, middle panel). In contrast, disruption of the particle membrane with detergent resulted in digestion of the M protein (FIG. 62, lower panel).

[0685] Taken together, these results demonstrated that the M protein VLPs are membrane-bound particles.

### Example 25

### M Protein Mediated VLP Release

[0686] This example extends the data relevant to M protein sufficiency for VLP release by studying the release of VLPs in the absence of an M protein gene.

[0687] Cells were transfected with all possible combinations of NP, F, and HN cDNAs in the absence of the M gene. Cells expressing any combination of proteins without M protein did not release VLPs. FIG. 63. Furthermore, in the absence of M protein, NP, F and HN proteins (expressed in pair-wise combinations) were retained in cell extracts after the 8 hour chase (FIG. 3; Panel A: lanes 2, 4 and 5, and Panel C).

[0688] These results strongly suggest that VLP release is mediated by the M protein.

### Example 26

### M Protein/Glycoprotein Co-Localization

[0689] This example explores further the role played by each protein in VLP assembly. Specifically, the plasma membrane localization of M, F and HN proteins was determined by immunofluorescence.

[0690] Transfected cells were incubated with anti-F protein or anti-HN protein antibodies prior to cell permeabilization to limit binding of antibodies to cell surface F or HN proteins. Cells were then permeabilized using 0.05% Triton X-100 and then incubated with M protein specific antibody.

[0691] Vector-transfected control cells and as well as cells expressing individually M, F-K115Q or HN proteins, demonstrated that the F-K115Q and HN proteins were diffusely distributed on the surface of the cells (FIG. 64, Panel A). M protein exhibited diffuse cytoplasmic staining as well as punctate structures of various sizes (FIG. 64, Panel A; anti-M image and merged image). Co-expression of either F or HN proteins with M protein, however, had little effect on the distribution of M protein, F protein, or HN protein. Further, little to no co-localization of F or HN glycoproteins with M protein was observed. FIG. 64, Panel B. These findings correlate with the very low incorporation of F or HN proteins into M protein containing VLPs after pair-wise co-expression.

[0692] Co-expression of M protein with at least two other proteins slightly changed the distribution of M protein. For example, M protein co-expression with F and HN proteins increased the co-localization of M protein with either F or HN proteins. FIG. 64, Panel C. This result is consistent with an increased incorporation of HN, F, or NP proteins when two proteins are co-expressed with M protein.

[0693] When all four proteins were co-expressed, the distribution of M protein was changed to more punctuate structures distributed mostly along the edges of the cells. Further, most of the F or HN protein signal co-localized with the M protein. FIG. 64, Panel D. Although it is not necessary to understand the mechanism of an invention, it is believed that this result is consistent with a more ordered assembly of VLPs when all four proteins are co-expressed.

[0694] Altogether, these results suggest that co-localization of viral proteins is detected with expression of three proteins and is most dramatic when NP, M, F and HN proteins are co-expressed. These results also suggest that there are specific protein-protein interactions involved in assembling particles.

### Example 27

### VLP Viral Protein Interactions

[0695] This example provides identification of several specific protein interactions involved in VLP assembly using co-immunoprecipitation techniques.

[0696] Radioactively labeled VLPs formed with different combinations of proteins were solubilized in 1% Triton X-100 and the proteins present were precipitated, separately, with cocktails of monospecific antibodies for M, HN or F proteins. Proteins were also precipitated with a mix of antibodies with specificities for all proteins in order to precipitate total VLP proteins (lane 6).

[0697] First, each antibody cocktail precipitated all proteins from VLPs formed with M, HN, F and NP, although the efficiency of precipitation for each protein varied with the antibody specificity (FIG. 65, Panel A). Although it is not necessary to understand the mechanism of an invention, it is believed that these results are consistent with a network of interactions between all four proteins such that precipitation of one resulted in the precipitation of the other three proteins.

[0698] The results also suggested that proteins indirectly linked to the precipitated protein were less efficiently precipitated than a protein directly linked to a precipitated protein. For example, anti-F protein antibody precipitated NP very efficiently but M protein very inefficiently (lane 3). This observation suggests that there may be a direct link between F protein and NP, but not F protein and M protein.

[0699] The protein interactions in VLPs were more clearly defined by precipitation of proteins from VLPs formed with all combinations of three proteins. In VLPs released from cells expressing M, F-K115Q and HN proteins, anti-F protein precipitated only F protein and traces of HN protein (FIG. 65, Panel B, lane 3). This result indicates that the F protein does not directly complex with the M protein.

[0700] Anti-HN protein antibody co-precipitated M protein and HN protein (FIG. 65, panel B, lane 4). Likewise, anti-M protein antibody co-precipitated HN protein and M protein (FIG. 65, panel B, lane 5). These results strongly suggest that the M protein interacts with HN protein but not with the F protein.

[0701] VLPs were also released containing NP, M and F-K115Q proteins. Anti-F protein antibody co-precipitated NP and F protein, but not M protein. (FIG. 65, panel C, lane 3). Anti-M protein antibody co-precipitated NP and M protein, but not F protein (FIG. 65, panel C, lane 4). These observations indicate that M protein directly interacts with NP and that the F protein interacts with NP and confirm that F and M protein do not interact.

[0702] Although it is not necessary to understand the mechanism of an invention, it is believed that anti-M protein antibody does not indirectly precipitate detectible amounts of F protein because an inefficient precipitation of NP protein may decrease the amounts of F protein precipitated to very low levels. Alternatively, NP-NP interactions required to precipitate F protein with anti-M protein antibody may be disrupted by VLP lysis. For example, when VLPs containing NP, M and RN were used, complexes formed with anti-HN protein antibody contained NP and M proteins as well as HN protein (FIG. 65, panel D, lane 3). In addition, anti-M protein antibody precipitated NP and HN proteins (FIG. 65, panel D, lane 4). These observations are consistent with the conclusion that the M protein interacts with both NP and HN proteins. It is further contemplated that, in one embodiment, HN protein and NP protein may interact.

[0703] Overall, results of co-immunoprecipitation of proteins in VLPs as well as results of cellular co-localization studies provide a rational basis for the incorporation of viral proteins into VLPs and suggest that specific protein interactions are involved in the assembly of an NDV virus-like particle.

### Example 28

### Comparison of NDV and Influenza VLP Release

[0704] In order to determine if an NDV platform for presentation of influenza virus antigens in a vaccine had an advantage over use of influenza VLPs, the inventor compared the release of VLPs from comparable numbers of avian ELL-0 cells expressing the influenza M1, HA, and NA proteins with cells expressing the NDV M, NP, F, and HN proteins. FIG. 163 shows the total proteins associated with particles (VLPs) released from each culture. Quantification of release of influenza VLPs and ND VLPs showed that, based on release of M1 and M proteins and the release of HA and HN proteins, the ND VLP release was 30-100 fold higher respectively, over a 24 hour period than that of influenza VLPs

[0705] These results demonstrate that ND VLPs were much more efficiently released than influenza virus VLPs. The inventor therefore proceeded to explore the incorporation of influenza HA and NA proteins into ND VLPs.

### Example 29

### Construction of Chimera Type 1 Protein Genes

[0706] Because the inventors considered it likely that specific incorporation of a glycoprotein into ND VLPs would require the CT and TM domains of the NDV glycoproteins for interactions with NDV M or NP proteins, a hybrid gene was constructed with the ectodomain of the influenza HA and the TM and CT domains of the NDV F protein. The constructions are diagramed in FIG. 164. Three constructions were made which varied the junction sequences. Chimera #1 joined the two domains without additional amino acids. Chimeras #2 and #3 included two to three additional amino acids to provide some flexibility between the two domains.

### Example 30

### Expression of Chimera HA/F proteins

[0707] The inventor next determined if the chimera proteins were expressed, folded, and delivered to cell surfaces. FIG. 165 shows that all three chimera proteins were expressed in ELL-0 avian cells and precipitated with antibody specific for influenza HA. All were detected at cell surfaces at levels comparable or better than the wild type HA protein. The chimera proteins were also detected with antibody specific for the cytoplasmic domain (CT) (anti-Ftail) of the NDV F protein showing that they were chimera proteins.

### Example 31

### Incorporation of an HA/F Chimera Protein into ND VLPs

[0708] HA/F #1 was used to determine if chimera type 1 proteins could be incorporated into ND VLPs. HA/F#1 cDNA was co-transfected with NDV M and NP protein cDNAs as well as various combinations of NDV glycoprotein cDNAs into ELL-0 cells. In addition, to compare the efficiency of the wild type HA protein incorporation into ND VLPs with the chimera protein, duplicate transfections were performed substituting the wild type HA cDNA for the HA/F chimera protein cDNA. Particles released from each of these transfections were purified by centrifugation through a 20% sucrose pad and the proteins present in each particle preparation were resolved by polyacrylamide gel electrophoresis (FIG. 166).

[0709] The results show that, most significantly, the HA/F chimera can be incorporated into ND VLPs. In addition, the data show that wild type HA was minimally incorporated into ND VLPS. Further, the data show that the HA/F chimera was most efficiently incorporated into ND VLPs in the presence of only NDV M and NP. Inclusion of NDV wild type fusion (Fwt) protein allows incorporation of the HA/F while the uncleaved F (F-K115G) inhibits chimera incorporation. Inclusion of both HN and F protein appears to inhibit incorporation of the chimera protein.

[0710] To determine the relative roles of HN, F, and NP proteins in incorporation of HA/F chimera, the chimera cDNA was transfected with glycoproteins in the absence of NP and with each NDV glycoprotein individually. All combinations contained NDV M protein cDNA. The results are shown in FIG. 167.

[0711] These results indicate that efficient chimera protein incorporation into ND VLPs occurs in the presence of NP. In the presence of NP, HN protein, in the absence of F protein, allows incorporation of the chimera protein and F protein, in the absence of HN protein allows incorporation of the chimera.

[0712] The data show that a chimera protein which contains the ectodomain of the HA glycoprotein fused to the TM and CT domain of the NDV F protein can be expressed, transported to cell surfaces. The data also show that the HA/F chimera protein was incorporated into ND VLPs. Further, the data demonstrate that incorporation of the HA/F protein occurs upon M and NP protein expression. Moreover, the data show that incorporation of the chimera protein also occurs when NDV F or HN protein was co-expressed with the chimera protein.

[0713] It was the inventor's opinion that the HA/F chimeras #2 and #3 will be more efficiently incorporated into ND VLPs as both of these chimera proteins were expressed on cell surfaces at higher levels than HA/F #1.

### Example 32

### Construction of Chimera Type 2 Glycoprotein Genes and Expression of the HN/NA Chimera Protein

[0714] To test the expression and VLP incorporation of a type 2 glycoprotein chimera into ND VLPs, sequences encoding the ectodomain of the influenza NA protein were fused to sequences encoding the NDV HN protein CT and TM domains in order to construct a chimera protein gene between these two type 2 glycoproteins. FIG. 168 shows a diagram of the construction. FIG. 169 shows that the chimera HN/NA protein was expressed in avian cells (lane 3).

### Example 33

### Incorporation of HN/NA Chimera Protein into ND VLPs

[0715] To test the incorporation of the HN/NA chimera protein into ND VLPs, ELL-0 cells were transfected with cDNAs encoding the NDV M and NP proteins along with the cDNA encoding the chimera protein. The inventor also transfected cells in parallel with cDNAs encoding the wild type influenza HA, NA, and M1 proteins in order to compare release of the chimera protein in ND VLPs with release of the wild type NA in influenza VLPs. FIG. 170 shows the proteins in particles released from each of these cell populations. Clearly the HN/NA chimera was very efficiently incorporated into ND VLPs containing the M and NP protein. The levels of release were significantly increased over levels of wild type NA protein released in influenza VLPs. Interestingly, a small amount of the HN/NA chimera protein was released as a particle when expressed alone.

[0716] To determine the role of NP, F, and HN protein on the incorporation of the HN/NA chimera protein into ND VLPs, the chimera protein was expressed with M protein and different combinations of NP, HN, and F protein. The results are shown in FIG. 171.

[0717] The results show that NP expression is important for HN/NA protein incorporation. Addition of F protein increases incorporation and addition of both NDV glycoproteins with NP significantly enhances incorporation of the chimera protein.

[0718] The data show that an HN/NA chimera can be expressed. The data also show that an HN/NA chimera can be incorporated into ND VLPs very efficiently. In addition, the data show that incorporation of the HN/NA chimera occurs in the presence of M and NP expression, and incorporation was enhanced by the co-expression of F protein, or a combination of HN and F proteins.

### Example 34

### ND VLPs Stimulate Immune Responses in Mice

[0719] Use of ND VLPs as a vaccine platform requires that these particles will stimulate an immune response in animals. To determine if these particles are effective immunogens, the inventor first developed conditions to purify the VLPs and to generate significant quantities for use as an immunogen.

### A. Purity of VLPs

[0720] Purification of VLPs was based on standard protocols used to purify intact virus grown in eggs. FIG. 172 shows a silver stain of the purified VLPs as well as purified NDV, strain B1, grown in eggs. Clearly the VLPs were as pure as the virus stock. Significantly, the amounts of HN and F proteins relative to NP were higher in the VLPs. The cDNAs, used to generate VLPs, were derived from NDV, strain AV. This strain of NDV has increased amounts of glycoproteins in egg grown virus preparations compared to the egg grown avirulent B1 strain.

### B. Generation of Microgram Quantities of VLPs

[0721] Because the release of VLPs was so efficient from avian cells, this experiment was conducted to determine if microgram quantities of these particles could be generated from transiently transfected avian cells. Indeed, only a minor scale up of the numbers of cells used yielded significant amounts of these particles. VLPs and egg grown B1 virus were purified using protocols used to purify virus from allantoic fluid of infected eggs (McGinnes et al. (2006) Newcastle Disease Virus: Propagation, quantification, and storage,” Vol 1, John Wiley and Sons, Inc.) Proteins, separated in polyacrylamide gels, were visualized by silver staining (see FIG. 172). Protein concentrations were measured by using albumin as a standard. Table 14 shows a comparison of yields of VLPs with an egg grown stock of virus. These VLPs were used to immunize mice.

TABLE 14
Yields of VLPs from tissue culture cells

| | | | | Total protein |
|---|---|---|---|---|
| Particle | Protein | Conc (ng/ml) | Total volume | (μg) |
| Strain B1 virus | H | 23.05 | 1 ml | 23.05 |
| (from 3.3 dozen | | | | |
| eggs) | | | | |
| | F | 11.09 | | 11.09 |
| | NP | 100.32 | | 100.09 |
| | M | 75.08 | | 75.08 |
| | Total | | | 209.54 |
| VLP (from 1.0 × | HN | 109.70 | 0.5 ml | 54.85 |
| 10⁸ cells) | | | | |
| | F | 85.42 | | 42.71 |
| | NP | 98.24 | | 49.71 |
| | M | 63.50 | | 31.75 |
| | Total | | | 178.43 |

### Example 35

### Immunization

[0722] Groups of five BALB/c mice were injected with different concentrations of VLPs or virus. Importantly, the inventor did not use any adjuvant, the absence of which significantly decreases toxic effects of vaccination in animals. One group of mice received 10 micrograms of total VLP protein, another group received 20 micrograms, and a third group received 40 micrograms. In parallel, groups of mice were injected with UV inactivated virions (10, 20, or 40 micrograms of total viral protein). Sham vaccinated mice (using phosphate buffered saline) were included in the protocol. The mice were injected intraperitoneally (IP). A second injection of 10 micrograms of either VLPs or virus was given to each mouse (IP) in the VLP or virus groups, respectively, on day 27. Sera were collected from the tail veins on day 10, day 20, day 37, and day 49.

[0723] On day 50, spleens were collected, and spleen cells were co-cultured for 6 days with NDV infected P815 cells. These spleen cells were then assayed for CTL activity as well as intracellular cytokine staining. UV inactivated virus was used as an immunogen since injection of live NDV into animals is not permitted by the USDA.

### A. ELISA Titers of Soluble Antibody

[0724] The anti-NDV antibody in each mouse serum was titered by serial dilution in an ELISA assay using as capture antigen purified, egg grown NDV that had been disrupted with Triton X-100. FIG. 173 shows a scatter plot of the titers of antibodies in the serum of each animal immunized with VLPs, while the results after virus immunization are shown in FIG. 174.

[0725] These results show that VLPs can stimulate a robust soluble immune response in mice, a response that was at least as good as that stimulated by virus. Furthermore, as little as 10 micrograms of total VLP protein was sufficient to result in significant soluble immune responses.

B. CTL Activities of Spleen Cells from Immunized Mice

[0726] The cytotoxic T lymphocyte (CTL) activities of spleen cells, harvested at 50 days post immunization and stimulated in vitro with NDV infected cells, were measured in a standard chromium release assay and the percents of cell lysis of target cells (NDV infected P815 cells) at different effector to target ratios are shown in FIG. 75.

[0727] The results show that VLPs do stimulate CTL activity and that, under these conditions, the levels were at least as high as those detected after immunization with virus particles.

C. Intracellular Cytokine Staining of Spleen Cells from Immunized Mice

[0728] As an additional measure of T cell activation after immunization with either VLPs or virus, spleen cells harvested and stimulated, as described above, were characterized for intracellular expression of gamma interferon. The percent of CD8+ cells that were positive for interferon gamma is shown in FIG. 176, left panel, while the percent of CD4+ cells that were positive for this cytokine expression is shown in FIG. 176, right panel.

[0729] The results show that VLPs can stimulate CD8 and CD4 T cells as well as inactivated virus. The above data also demonstrate that VLPs can stimulate both soluble and cellular immune responses to the NDV proteins. The data also show that the VLPs were at least as good an immunogen as virus particles. The data also show that very small amounts of total VLP protein were effective as immunogens. These results demonstrate that foreign proteins incorporated into NDV VLPs stimulate robust immune responses.

### Example 36

### Incorporation of Cytotoxic T Lymphocyte (CTL) Epitope into Newcastle Disease (ND) VLPs

[0730] Using the above described methods, the CTL epitope sequence YPYDVPDYA (SEQ ID NO: 227) was expressed in ELL-0 cells as a fusion protein that was fused to the carboxyl terminus of NDV HN protein, to the amino terminus of NDV NP protein, or to the carboxyl terminus of the NDV NP protein. Each of the three fusion proteins resulted in the incorporation of the CTL epitope into VLPs.

### Example 37

### Construction of ND VLPs Containing the RSV G Protein Ectodomain (RSV Strain A)

[0731] The above data demonstrated that cells expressing the major structural proteins of Newcastle disease virus (NDV) release VLPs very efficiently and these VLPs stimulate robust immune responses in mice. The following Examples were carried out to investigate the inventor's hypothesis that the G protein of RSV can be incorporated into ND VLPs and these particles can be used to stimulate protective immune responses in a murine model system.

[0732] To incorporate the RSV G protein (from stain a) into ND VLPs, the cytoplasmic domain (CT) and transmembrane (TM) domains of the NDV HN protein was fused, in frame, to the ectodomain of the RSV Ga protein using standard recombinant DNA protocols. A diagram of the fusion is shown in FIG. 241. The amino acid sequence of the fusion protein (HN/Ga) and the nucleotide sequence of the fusion protein gene are shown in FIG. 242.

[0733] In a similar construction, the ectodomain of the G protein from RSV strain b, was fused to the CT and TM domains of the NDV HN protein. The amino acid sequence of the chimera protein (HN/Gb) and the nucleotide sequence of the chimera protein gene are shown in FIG. 243.

### Example 38

### Expression of the Chimera Protein

[0734] The cDNA encoding the chimera protein HN/Ga was transfected into different cell types (Avian ELL-0, COS-7, Hep-2) and the expressed protein was detected by Western Analysis using anti-RSV antibody to detect the proteins using standard protocols. Proteins present in extracts of Vero cells infected with RSV were used as a positive control. FIG. 244 shows a representative result.

[0735] The HN/Ga protein was heterogeneous in size, due to variable glycosylation. Similar results were obtained with the wild type RSV Ga protein cDNA. In addition, the sizes of the largest form of the HN/Ga varied with the cell type. The chimera protein in avian cells was less glycosylated than the chimera made in COS-7 cells (and Hep-2 cells, not shown), which was, in turn slightly less glycosylated than the protein made in VERO cells. Similar results were obtained with the wild type G protein.

[0736] Similar results were obtained with the HN/Gb protein chimera (not shown).

### Example 39

### Incorporation of HN/Ga into ND VLPs

[0737] Avian ELL-0 cells were transfected with cDNAs encoding the NDV Membrane protein (M), the NDV NP protein, and the chimera HN/Ga. Cell supernatants were harvested and the VLPs were purified by the protocols described above. FIG. 245, left panel, shows a silver stained polyacrylamide gel containing the proteins present in the VLPs. The right panel shows a Western analysis of the proteins in these VLPs using anti-RSV antisera to detect the RSV G protein.

[0738] The inventor discovered that the release of these VLPs was inefficient unless heparin was added to the supernatant of the transfected cells. Heparin when added to transfected cells at a concentration of 10 micrograms/ml in the final 48 hours following transfection resulted in approximately a 10-fold increase in the number of released VLPs. The H/Ga chimera protein was approximately 15-20% of the total VLP protein. Similarly we produced VLPs after transfecting avian cells with cDNAs encoding the NDV M and NP proteins as well as the HN/Gb chimera (not shown).

[0739] Similar results were obtained after transfecting COS-7 cells with cDNAs encoding the NDV M, NP, and the HN/Ga chimera as illustrated in FIG. 246.

### Example 40

### Immuno Genicity of VLPs Containing the Ga Protein Ectodomain (VLP-Ga)

[0740] Mice were immunized with intraperitoneal inoculation (IP) with 1, 3, 10, or 30 μg total VLP-H/G protein (5 mice/group) or comparable amounts of UV inactivated, purified RSV. Amounts of G protein in VLP-H/G and UV-RSV were comparable. Another set of mice received live RSV intranasally (IN) (3×10⁶ pfu). A third set of mice was injected with PBS. Serum was obtained from the tail vein at days 14, 21, and 28.

[0741] Antibodies in the sera were detected in standard ELISA assays and are illustrated in FIGS. 247 and 248. FIG. 247 illustrates antibody titers using RSV infected VERO cells as the target antigen, eliminating detection of antibodies that may be against avian proteins in the VLP preparation. The only antigen that is detected is the RSV G protein.

[0742] The data demonstrated that VLP-H/Ga stimulated antibody responses to the fully glycosylated G protein in infected VERO cells. Responses to all concentrations of VLPs were detected with increasing responses with higher doses of antigen.

[0743] FIG. 248 shows comparison of the antibody responses to the G protein after immunization with VLP-H/Ga, UV inactivated RSV, and live RSV. ELISA assays were accomplished using as capture antigen extracts from avian cells transfected with cDNA encoding the RSV G protein. As determined by Western analysis, the amount of G protein in the avian extract used in FIG. 248 was the same as the amount of G protein in the RSV infected VERO cell extracts used in the FIG. 247. Error bars indicate standard deviation of responses within each group of five mice.

[0744] The data demonstrated that antibody responses to RSV Ga protein after immunization with VLP-H/Ga were better than responses to live RSV or comparable amounts of UV-RSV.

[0745] The data also showed that Antibody responses to VLP-H/G were similar using as capture antigen the fully glycosylated G protein in infected VERO cell extracts or the under glycosylated G protein in avian cell extracts.

[0746] Additionally, the data demonstrated that the low level of responses to the G protein in RSV immunized mice does not reflect a failure of the virus to stimulate murine antibodies. Immunization of mice with either live or UV-RSV stimulated significant antibody responses to proteins present in RSV infected VERO cells (not shown).

### Example 41

### Protection of Immunized Mice after Challenge with Live RSV

[0747] The goal of this Example was to determine if immunization with the VLP-Ga could protect mice from infection with live RSV. Mice were immunized with 30 μg VLP-H/G and boosted with 10 μg of VLP-H/G (IP). The mice were then challenged with intranasal inoculation with 3×10⁶ pfu of RSV. Control mice were immunized and boosted with live RSV (3×10⁶ pfu IN). Another set of mice received no immunization. Four days after challenge, the titer of virus in lungs was determined by plaque assay. Virus was detected only in mice not previously immunized (FIG. 249). Values shown in immunized mice are the limit of detection in the assay.

[0748] The data demonstrated that VLP-H/Ga immunization protected mice from RSV replication in lungs.

### Example 42

### Histology of Murine Lungs after Live RSV Challenge

[0749] To determine if VLP-Ga immunization resulted in abnormal immune reactions after RSV challenge, the histology of lungs was examined for inflammation. FIG. 250 shows scoring (blind scoring by an expert in pulmonary histology) of the tissue sections for inflammation. There was no difference in the inflammation scores between mice immunized with live RSV and mice immunized with VLP-Ga.

[0750] All publications and patents mentioned in the above specification are herein incorporated by reference. Various modifications and variations of the described compositions and methods of the invention will be apparent to those skilled in the art without departing from the scope and spirit of the invention. Although the invention has been described in connection with specific preferred embodiment, it should be understood that the invention as claimed should not be unduly limited to such specific embodiments. Indeed, various modifications of the described modes for carrying out the invention which are obvious to those skilled in the art and in fields related thereto are intended to be within the scope of the following claims.

We claim:

1. A virus-like particle (VLP) comprising
a) a Newcastle disease virus matrix (M) protein,
b) a Newcastle disease virus transmembrane domain (TM) protein,
c) a Newcastle Disease Virus cytoplasmic domain (CT) protein, and
d) a Respiratory Syncytial Virus (RSV) ectodomain protein,
wherein said transmembrane (TM) protein is flanked by said cytoplasmic domain (CT) protein and said ectodomain protein.

2. The VLP of claim 1, wherein said VLP further comprises a Newcastle disease virus nucleocapsid (NP) protein.

3. The VLP of claim 2, wherein said Newcastle disease virus nucleocapsid (NP) protein comprises SEQ ID NO:12.

4. The VLP of claim 2, wherein said VLP further comprises Newcastle Disease Virus fusion (F) protein.

5. The VLP of claim 2, wherein said VLP further comprises Newcastle Disease Virus heamagglutinin-neuraminidase (HN) protein.

6. The VLP of claim 1, wherein said RSV ectodomain is a human RSV G protein ectodomain.

7. The VLP of claim 6, wherein said NDV TM protein and said NDV CT protein are operably linked to said human RSV G protein ectodomain.

8. The VLP of claim 1, wherein said Newcastle disease virus matrix (M) protein comprises SEQ ID NO:6.

9. The VLP of claim 1, wherein said Newcastle disease virus transmembrane domain (TM) protein comprises IAILLLTVMTLAISAAALAYS (SEQ ID NO:386).

10. The VLP of claim 1, wherein said Newcastle disease virus cytoplasmic (CT) protein comprises MNRAVCQVALENDEREAKNTWRLVFR (SEQ ID NO:117).

11. The VLP of claim 1, wherein said RSV is strain a.

12. The VLP of claim 11, wherein said RSV strain a ectodomain protein comprises SEQ ID NO:387.

13. The VLP of claim 1, wherein said RSV is strain b.

14. The VLP of claim 13, wherein said RSV strain b ectodomain protein is encoded by a nucleotide sequence comprising SEQ ID NO:391.

15. The VLP of claim 2, wherein
a) said Newcastle disease virus matrix (M) protein comprises SEQ ID NO:6,
b) said Newcastle disease virus transmembrane domain (TM) protein comprises IAILLLTVMTLAISAAALAYS (SEQ ID NO:386).
c) said Newcastle Disease Virus cytoplasmic domain (CT) protein comprises MNRAVCQVALENDEREAKNTWRLVFR (SEQ ID NO:117),
d) said Respiratory Syncytial Virus (RSV) ectodomain protein is selected from the group consisting of SEQ ID NO:387 and SEQ ID NO:391, and
e) said Newcastle disease virus nucleocapsid (NP) protein comprises SEQ ID NO:12.

16. The VLP of claim 1, wherein said VLP is purified.

17. The VLP of claim 1, wherein said VLP is immunogenic.

18. The VLP of claim 1, wherein said VLP is comprised in a vaccine.

19. An expression vector comprising a nucleotide sequence that encodes the VLP of claim 1.

20. A vaccine comprising the VLP of claim 1.

21. The vaccine of claim 20, further comprising an adjuvant.

22. A method for producing a Respiratory Syncytial Virus (RSV) ectodomain protein, comprising
a) providing an expression vector comprising, in operable combination,
1) a first nucleic acid sequence encoding a Newcastle disease virus transmembrane domain (TM) protein,
2) a second nucleic acid sequence encoding Newcastle Disease Virus cytoplasmic domain (CT) protein,
3) a third nucleic acid sequence encoding a Respiratory Syncytial Virus (RSV) ectodomain protein, wherein said first nucleic acid sequence is flanked by said second and third nucleic acid sequences, and
4) a fourth nucleic acid sequence encoding Newcastle Disease Virus matrix (M) protein,
b) providing a target host cell, and
c) transfecting said target host cell with said vector to produce a transfected host cell that produces virus-like particles (VLPs) that comprise said RSV ectodomain protein.

23. The method of claim 22, wherein said expression vector further comprises, in operable combination, a fifth nucleic acid sequence encoding Newcastle disease virus nucleocapsid (NP) protein.

24. The method of claim 23, wherein said Newcastle disease virus nucleocapsid (NP) protein comprises SEQ ID NO:12.

25. The method of claim 23, wherein said VLP further comprises Newcastle Disease Virus fusion (F) protein.

26. The method of claim 23, wherein said VLP further comprises Newcastle Disease Virus heamagglutinin-neuraminidase (HN) protein.

27. The method of claim 22, wherein said Newcastle disease virus matrix (M) protein comprises SEQ ID NO:6.

28. The method of claim 22, wherein said Newcastle disease virus transmembrane domain (TM) protein comprises IAILLLTVMTLAISAAALAYS (SEQ ID NO:386).

29. The method of claim 22, wherein said Newcastle disease virus cytoplasmic (CT) protein comprises MNRAVCQVALENDEREAKNTWRLVFR (SEQ ID NO:117).

30. The method of claim 22, wherein said RSV is strain a.

31. The method of claim 30, wherein said RSV strain a ectodomain protein comprises SEQ ID NO:387.

32. The method of claim 22, wherein said RSV is strain b.

33. The method of claim 32, wherein said RSV strain b ectodomain protein is encoded by a nucleotide sequence comprising SEQ ID NO:391.

34. The VLP of claim 23, wherein
a) said Newcastle disease virus matrix (M) protein comprises SEQ ID NO:6,
b) said Newcastle disease virus transmembrane domain (TM) protein comprises IAILLLTVMTLAISAAALAYS (SEQ ID NO:386).
c) said Newcastle Disease Virus cytoplasmic domain (CT) protein comprises MNRAVCQVALENDEREAKNTWRLVFR (SEQ ID NO:117),
d) said Respiratory Syncytial Virus (RSV) ectodomain protein is selected from the group consisting of SEQ ID NO:387 and SEQ ID NO:391, and
e) said Newcastle disease virus nucleocapsid (NP) protein comprises SEQ ID NO:12.

35. The method of claim 22, wherein said method further comprises contacting said transfected host cell with a glycosaminoglycan.

36. The method of claim 35, wherein said glycosaminoglycan is selected from the group consisting of heparin, heparin sulfate, chondroitin sulfate B, hyaluronic acid, and keratan sulfate.

37. The method of claim 36, wherein said glycosaminoglycan comprises heparin.

38. The method of claim 35, wherein said glycosaminoglycan is at a concentration of from 1 to 100 micrograms per milliliter.

39. The method of claim 35, wherein said glycosaminoglycan is at a concentration of 10 micrograms per milliliter.

40. The method of claim 35, wherein said contacting with said glycosaminoglycan is under conditions that produce an increase in the number of said VLPs compared to the number of said 25 VLPS in the absence of said contacting.

41. The method of claim 40, wherein said increase is from 2 fold to 50 fold.

42. The method of claim 40, wherein said increase is 10 fold.

43. The method of claim 22, further comprising step d) purifying said VLPs.

44. The method of claim 22, wherein said VLPs are immunogenic.

45. A transfected cell produced by the method of claim 22.

46. A VLP produced by the method of claim 22.

47. A method for producing a Respiratory Syncytial Virus (RSV) ectodomain protein, comprising
a) providing a first expression vector comprising, in operable combination,
1) a first nucleic acid sequence encoding a Newcastle disease virus transmembrane domain (TM) protein,
2) a second nucleic acid sequence encoding Newcastle Disease Virus cytoplasmic domain (CT) protein, and
3) a third nucleic acid sequence encoding a Respiratory Syncytial Virus (RSV) ectodomain protein, wherein said first nucleic acid sequence is flanked by said second and third nucleic acid sequences,
b) providing a second expression vector comprising a fourth nucleic acid sequence encoding Newcastle Disease Virus matrix (M) protein,
c) providing a target host cell, and
d) transfecting said target host cell with said first and second vectors to produce a transfected host cell that produces virus-like particles (VLPs) that comprise said RSV ectodomain protein.

48. A method for immunizing an animal against Respiratory Syncytial Virus, comprising
a) providing
1) a vaccine comprising the VLP of claim 1, and
2) an animal, and
b) administering said vaccine to said animal to produce an immune response against said Respiratory Syncytial Virus.

49. The method of claim 48, wherein said immune response comprises antibody that specifically binds to said RSV ectodomain protein.

50. The method of claim 48, wherein said immune response comprises T lymphocytes that specifically bind to said RSV ectodomain protein.

The application's sequence listing, which the Patent Office published only in electronic form, follows.

SEQUENCE LISTING (392 sequences)

SEQ ID NO: 1 - protein, 4 aa, Epstein Barr virus
FPIV

SEQ ID NO: 2 - protein, 4 aa, Artificial Sequence
  Synthetic
  misc_feature (2)..(3): Xaa can be any naturally occurring amino acid
PXXP

SEQ ID NO: 3 - protein, 4 aa, Artificial Sequence
  Synthetic
  misc_feature (2)..(3): Xaa can be any naturally occurring amino acid
YXXL

SEQ ID NO: 4 - protein, 4 aa, Artificial Sequence
  Synthetic
PTAP

SEQ ID NO: 5 - protein, 4 aa, Artificial Sequence
  Synthetic
  misc_feature (3)..(3): Xaa can be any naturally occurring amino acid
PPXY

SEQ ID NO: 6 - protein, 489 aa, Newcastle disease virus
MSSVFDEYEQLLAAQTRPNGTHGGGEKGSTLKVEVPVFTLNSDDPEDRWNFAVFCLRIAVSEDANKPLRQGALISLLCSHSQVMRNHVALAGKQNEATLAVLEIDSFADSVPQFNNRSGVSEERAQRFMVIAGSLPRACSNGTPFVTAGVEDDAPEDITDTLERILSIQAQVWVTVAKAMTAYETADESETRRINKYMQQGRVQKKYILHPVCRSAIQLTIRHSLAVRIFLVSELKRGRNTAGGSSTYYNLVGDVDSYIRNTGLTAFFLTLKYGINTKTSALALSSLTGDIQKMKQLMRLYRMKGENAPYMTLLGDSDQMSFAPAEYAQLYSFAMGMASVLDKGTGKYQFARDFMSTSFWRLGVEYAQAQGSSINEDMAAELKLNPAARRGLAAAAQRVSEEIGNMDIPTQQAGVLTGLSDKGPRAPQGGPSRSQGQPDAGDGETQFLDLMRAVANSMREAPNSAQSTIHPEPLPTHGPSQDNDTDWGY

SEQ ID NO: 7 - DNA, 1470 bp, Newcastle disease virus
atgtcgtccgtatttgacgaatacgagcagctcctcgctgctcagacccgccctaacggaactcatggagggggagagaaagggagcactttaaaagttgaggtcccagtatttacccttaacagtgatgatccagaggatagatggaattttgcggtattctgtcttcggattgctgttagcgaggatgccaacaaaccactcaggcaaggtgctcttatatccctcttatgctcccattctcaggtgatgagaaaccacgttgcccttgcagggaaacagaatgaggctacactggctgttcttgagatcgatagttttgccgacagtgtgccccagttcaacaataggagtggagtgtctgaggaaagagcacagagattcatggtaatagcaggatctctccctcgggcatgcagcaacggtactccgttcgtcacagctggggttgaagatgatgcaccagaagatatcactgacactctggaaagaatcctatctatccaggctcaggtatgggtcacagtagcaaaggccatgactgcatatgagacagcagatgagtcggaaacaagaagaataaataagtatatgcagcaaggtagagtccagaagaaatacatccttcaccctgtatgcaggagtgcaattcaactcacaatcagacattctctggcagtccgtattttcctagttagtgagctcaagaggggccgcaatacagcaggtgggagctccacatattacaacttggtcggggatgtagactcatacatcagaaacaccgggcttactgcatttttcctaacactcaaatatggaatcaataccaagacgtcagccctcgcactcagcagcctcacaggtgatatccaaaaaatgaaacagctcatgcgtttatatcggatgaaaggtgaaaatgcaccatacatgacattgttaggtgacagtgaccagatgagctttgcaccagctgagtatgcacaactttattcttttgccatgggcatggcatcagtcttagataagggaactggcaaataccaattcgccagagacttcatgagcacatcattctggagactcggggtggagtatgctcaggctcagggaagtagcatcaatgaagatatggctgctgaattgaaacttaacccagcagcaaggaggggcctggcagctgctgcccaacgagtatctgaggaaattggcaacatggatattcctactcaacaggccggggtccttactgggctcagcgacaaaggtccccgagctccacagggtggaccgagcaggtcgcaagggcaaccggacgccggggatggggagacccaattcctggatctgatgagagcagtggcaaacagcatgcgagaagcgccaaattctgcacagagcaccattcacccggagcctctcccaactcatgggccatctcaagacaacgacaccgactgggggtactga

SEQ ID NO: 8 - protein, 571 aa, Newcastle disease virus
MDRVVSRVVLENEEREAKNTWRLVFRIAVLSLVVMTLAISVATLVYSMEASTPGDLAGISTVISKAEDKVISLLSSNQDVVDRVYKQVALESPLALLNTESVIMNAITSLSYQINGAANNSGCGAPVHDPDYVGGVGKELIVDDTSDVTSFYPSAYQEHLNFIPAPTTGSGCTRIPSFDMSATHYCYTHNVILSGCRDHSHSHQYLALGVLRTSATGRVFFSTLRSINLDDTQNRKSCSVSATPLGCDMLCSKVTEIEEEDYKSATPTSMVHGRLGFDGQYHEKDLDVTALFKDWVANYPGVGGGSLIGDRVWFPVYGGLKPNSPSDIAQEGRYVIYKRYNNTCPDEQDYQVRMAKSSYKPGRFGGKRVQQAILSIKVSVSLGEDPVLTVPPNTVTLMGAEGRVLTVGTSHFLYQRGSSYFSPALLYPMTIHNKTATLHSPYTFNAFTRPGSVPCQASARCPNSCITGVYTDPYPVVFHKNHTLRGVFGTMLDNEQARFNPVSAVFDYTSRSRITRVSSSSTKAAYTTSTCFKVVKTNKIYCLSIAEISNTLFGEFRIVPLLVEILKDDRV

SEQ ID NO: 9 - DNA, 2120 bp, Newcastle disease virus
acgggtagaacggtgggagaggccaccccttagtggggaaccaagcttcttaacgtccgttctaccgcattaccaatagcataccttagtcatggatcgtgtagttagtagggttgtactagagaatgaggaaagagaagcaaagaacacatggcgcctggtttttcggatcgcagtcttatctctagtagtaatgactttagctatctctgttgccaccctagtatacagcatggaggctagcacaccgggcgatctggcgggcatatcgacggtgatctctaaggcagaggataaggtgatatctctactcagttcaaatcaagatgtggtagatagggtatataaacaggtggcccttgagtccccactggcattgctgaatactgagtctgtaattatgaatgcaataacttctctctcctatcaaattaacggagccgcaaataatagtgggtgtggggcacctgttcatgacccagattacgttgggggagtaggcaaagagctcatagtagatgacacaagtgatgtcacatcattctacccttcagcataccaagaacacctgaattttatcccggcgcctactacaggatcaggctgcactcggataccctcgttcgacatgagcgctacccattattgttatactcacaatgtaatattatctggttgcagagatcactcacactcacatcagtatttagcactaggtgtacttcggacatctgcaacagggagggtattcttttctactctgcgctccatcaatttggatgacacccaaaatcggaagtcttgcagtgtgagtgcgactcctttaggttgtgatatgctgtgctctaaagtcacagarattgaagaggaggattataagtcagctactcccacatcaatggtgcatggaaggttaggrtttgacggtcagtatcatgagaaggacttagacgtcacagccttatttaaggattgggttgcaaattatccaggagtgggaggagggtctcttattggcgaccgtgtatggttcccagtttatggagggcttaaacccaattcgcctagtgacattgcacaagaggggagatatgtaatatataagcgctataataacacatgccccgatgaacaggattaccaagttcggatggctaagtcttcatataagcctggacggtttggtggaaagcgcgtacagcaagccatcttatctatcaaagtatcagtatctttgggcgaggacccggtgctaaccgtaccccctaatacagttacactcatgggggccgaaggcagggtcctcacagtagggacatctcacttcttgtaccaacgagggtcttcatacttctctcccgccttactataccctatgacaatacacaacaaaacagctactcttcatagtccctatacattcaatgctttcactcggccaggcagtgtcccctgccaggcatcagcaaggtgccccaactcatgcatcactggagtctatactgatccatatcctgtggtctttcataagaatcacaccctgcgaggggtattcgggacgatgcttgataatgaacaagcaaggttcaaccctgtatctgcagtatttgattacacatctcgcagtcgcataacccgggtaagttcgagcagcaccaaggcagcatacacgacatcgacatgttttaaagttgtcaagaccaataaaatttattgtcttagcattgcagaaatatccaataccctatttggggaattcaggattgtccctctactggttgagatcctcaaggatgatagggtttaagaggctaagttcagccggccgggtcaaccacgaggaagacgggaagatggcgttgtgtcacctaccctctgcaatgccaaggatcaagcggaataataatactagcccgaatctcatgctatcagacagccttaatcggataatgctgacacgatcagcttgaatcctgtcaatagtcactctgtttagaaaaaatatgagaggtggtgggatataagagaaaacaacttacagaagatagcacgggtaggacatggcgggctccggtcccgaaagggcagagcaccagattatcctaccagagtcacacctg

SEQ ID NO: 10 - protein, 256 aa, Newcastle disease virus
MGSKPSTRIPVPMMLITQIVLILSCICLTSSLDGRPLAAAGIVVTGDKAVNIYTSSQTGSIIVKLLPNMPKDKEACAKAPLEAYNRTLTTLLTPLGDSIRRIQGSVSTSRGRRQKRFIGAIIGSVALGVATSAQITAAAALIQANQNAANILRLKESIAATNEAVHEVTDGLSQLAVAVGKMQQFVNDQFNNTARELDCIKITQQVGIELNLYLTELTTVFGPQITSPALTQLTIQALYNLAGGNMDYLLTKLGVG

SEQ ID NO: 11 - DNA, 993 bp, Newcastle disease virus
tgaggttacttctactaggttagagaagaggcacaccattgctaaatacaatcctttcaagaagtaagttgcgtccctgagactgcgatccacccactttcctggatcatcgcaacgcaaaataatgatctgtctcgattgcttgcagttggttcacctgtctatctagttagaaaaaacacgggtagaagagtctggatcccagctggcacattcaaggtgcagtatgggctctaaaccttctaccaggatcccagtacctatgatgctgatcacccaaattgtgttgatactgagctgtatctgtctgacaagctcccttgacggcaggcctcttgcagctgcggggattgtggtaacaggagataaagcagtcaatatatacacctcatctcagacggggtcaatcatagtcaagttgctcccaaatatgcccaaggataaagaggcgtgtgcaaaagccccgttagaagcatacaacagaacactgaccactttactcaccccccttggtgattccatccgcaggatacaagggtctgtgtccacatcaagaggaaggagacagaaacgctttataggtgccattatcggcagtgtagctcttggggtcgcaacatcggcacagataacagcagctgcggccctaatacaagccaaccagaatgccgccaacatcctccggcttaaggagagcattgctgcaaccaatgaagctgtgcatgaggtcaccgacggattatcgcaactagcagtggcagttgggaagatgcagcagtttgttaatgaccaatttaataatacggcgcgagaattggactgtatcaaaattacacaacaagtcggtatagaactcaacctatacctaactgagttgactacagtgttcgggccacaaatcacttcccctgccctaactcagctgactatccaggcactttataatttagctggtggcaacatggattacttgttgactaagttaggcgtagg

SEQ ID NO: 12 - protein, 364 aa, Newcastle disease virus
MDSSRTIGLYFDSALPSSNLLAFPIVLQDTGDGKKQFAPQYRIQRLDSWTDSKEDSVFITTYGFIFQVGDEEATVGMINDEPKRELLSAAMLCLGSVPNVGDLVELARACLTMAVTCKKSATNTERMVFSVVQAPQVLQSCRVVANKYSSVNAVKHVKAPEKIPGSGTLEYKVNFVSLTVVPRKDVYKIPTAALKVSGSSLYNLALNVTIDVEVDPKSPLVKSLSKSDSGYYANLFLHIGLMSTVDKKGKKVTFDKLEKKIRRLDLSVGLSDVLGPSVLVKARGARTKLMAPFFSSSGTACYPIANASPQVAKILWSQTAHLRSVKVIIQAGTQRAVAVTADHEATSTKLEKGHTHSKYNPFKK

SEQ ID NO: 13 - DNA, 1095 bp, Newcastle disease virus
atggactcatctaggacaatcggactgtactttgattctgcccttccttctagcaacttgttagcattcccgatcgtcctacaggacacaggagatggaaagaagcaattcgccccgcaatataggatccagcgtcttgactcgtggaccgatagtaaagaagactcagtattcatcacaacctatggattcatcttccaggtcggggatgaggaagccactgtcggtatgatcaatgatgaacccaagcgcgagttactttctgctgcgatgctctgtctaggaagtgtcccaaacgtcggagatctcgttgagctggcaagggcctgtctcaccatggcagtcacatgcaagaagagtgcaactaatactgagaggatggttttctcagtggtgcaggcaccacaagtgctgcagagctgcagggttgtggcaaataaatattcgtcagtgaatgctgttaagcacgtgaaggcgccagagaagatccctggaagcgggaccctagagtacaaggtgaactttgtctccttgaccgtggtaccgagaaaggatgtctacaagatcccaaccgcagcattgaaggtttctggttcgagtctgtataatcttgcgctcaatgtcaccattgatgtggaggtggatccgaagagcccgttggttaaatcgctatctaagtctgacagtggctattacgctaatctcttcttgcatattggacttatgtccactgtagataagaaggggaagaaagtgacatttgacaaattggaaaagaagataaggagacttgatctatctgtcgggctcagtgacgtgcttggaccttccgtgttggtgaaggcaagaggtgcacggaccaaattgatggcacctttcttctccagtagtggaacagcctgctaccccatagcgaatgcctctcctcaggtagccaagatactctggagtcaaaccgcgcacctgcggagtgtgaaagtcatcatccaagcaggcacccaacgcgccgtcgcagtgactgctgaccacgaggctacatccaccaagctggaaaaggggcatacccattccaaatacaatcctttcaagaaatag

SEQ ID NO: 14 - DNA, 6159 bp, Baculovirus expression vector pUltraBac-1
ttctctgtcacagaatgaaaatttttctgtcatctcttcgttattaatgtttgtaattgactgaatatcaacgcttatttgcagcctgaatggcgaatgggacgcgccctgtagcggcgcattaagcgcggcgggtgtggtggttacgcgcagcgtgaccgctacacttgccagcgccctagcgcccgctcctttcgctttcttcccttcctttctcgccacgttcgccggctttccccgtcaagctctaaatcgggggctccctttagggttccgatttagtgctttacggcacctcgaccccaaaaaacttgattagggtgatggttcacgtagtgggccatcgccctgatagacggtttttcgccctttgacgttggagtccacgttctttaatagtggactcttgttccaaactggaacaacactcaaccctatctcggtctattcttttgatttataagggattttgccgatttcggcctattggttaaaaaatgagctgatttaacaaaaatttaacgcgaattttaacaaaatattaacgtttacaatttcaggtggcacttttcggggaaatgtgcgcggaacccctatttgtttatttttctaaatacattcaaatatgtatccgctcatgagacaataaccctgataaatgcttcaataatattgaaaaaggaagagtatgagtattcaacatttccgtgtcgcccttattcccttttttgcggcattttgccttcctgtttttgctcacccagaaacgctggtgaaagtaaaagatgctgaagatcagttgggtgcacgagtgggttacatcgaactggatctcaacagcggtaagatccttgagagttttcgccccgaagaacgttttccaatgatgagcacttttaaagttctgctatgtggcgcggtattatcccgtattgacgccgggcaagagcaactcggtcgccgcatacactattctcagaatgacttggttgagtactcaccagtcacagaaaagcatcttacggatggcatgacagtaagagaattatgcagtgctgccataaccatgagtgataacactgcggccaacttacttctgacaacgatcggaggaccgaaggagctaaccgcttttttgcacaacatgggggatcatgtaactcgccttgatcgttgggaaccggagctgaatgaagccataccaaacgacgagcgtgacaccacgatgcctgtagcaatggcaacaacgttgcgcaaactattaactggcgaactacttactctagcttcccggcaacaattaatagactggatggaggcggataaagttgcaggaccacttctgcgctcggcccttccggctggctggtttattgctgataaatctggagccggtgagcgtgggtctcgcggtatcattgcagcactggggccagatggtaagccctcccgtatcgtagttatctacacgacggggagtcaggcaactatggatgaacgaaatagacagatcgctgagataggtgcctcactgattaagcattggtaactgtcagaccaagtttactcatatatactttagattgatttaaaacttcatttttaatttaaaaggatctaggtgaagatcctttttgataatctcatgaccaaaatcccttaacgtgagttttcgttccactgagcgtcagaccccgtagaaaagatcaaaggatcttcttgagatcctttttttctgcgcgtaatctgctgcttgcaaacaaaaaaaccaccgctaccagcggtggtttgtttgccggatcaagagctaccaactctttttccgaaggtaactggcttcagcagagcgcagataccaaatactgtccttctagtgtagccgtagttaggccaccacttcaagaactctgtagcaccgcctacatacctcgctctgctaatcctgttaccagtggctgctgccagtggcgataagtcgtgtcttaccgggttggactcaagacgatagttaccggataaggcgcagcggtcgggctgaacggggggttcgtgcacacagcccagcttggagcgaacgacctacaccgaactgagatacctacagcgtgagcattgagaaagcgccacgcttcccgaagggagaaaggcggacaggtatccggtaagcggcagggtcggaacaggagagcgcacgagggagcttccagggggaaacgcctggtatctttatagtcctgtcgggtttcgccacctctgacttgagcgtcgatttttgtgatgctcgtcaggggggcggagcctatggaaaaacgccagcaacgcggcctttttacggttcctggccttttgctggccttttgctcacatgttctttcctgcgttatcccctgattctgtggataaccgtattaccgcctttgagtgagctgataccgctcgccgcagccgaacgaccgagcgcagcgagtcagtgagcgaggaagcggaagagcgcctgatgcggtattttctccttacgcatctgtgcggtatttcacaccgcagaccagccgcgtaacctggcaaaatcggttacggttgagtaataaatggatgccctgcgtaagcgggtgtgggcggacaataaagtcttaaactgaacaaaatagatctaaactatgacaataaagtcttaaactagacagaatagttgtaaactgaaatcagtccagttatgctgtgaaaaagcatactggacttttgttatggctaaagcaaactcttcattttctgaagtgcaaattgcccgtcgtattaaagaggggcgtggccaagggcatggtaaagactatattcgcggcgttgtgacaatttaccgaacaactccgcggccgggaagccgatctcggcttgaacgaattgttaggtggcggtacttgggtcgatatcaaagtgcatcacttcttcccgtatgcccaactttgtatagagagccactgcgggatcgtcaccgtaatctgcttgcacgtagatcacataagcaccaagcgcgttggcctcatgcttgaggagattgatgagcgcggtggcaatgccctgcctccggtgctcgccggagactgcgagatcatagatatagatctcactacgcggctgctcaaacctgggcagaacgtaagccgcgagagcgccaacaaccgcttcttggtcgaaggcagcaagcgcgatgaatgtcttactacggagcaagttcccgaggtaatcggagtccggctgatgttgggagtaggtggctacgtctccgaactcacgaccgaaaagatcaagagcagcccgcatggatttgacttggtcagggccgagcctacatgtgcgaatgatgcccatacttgagccacctaactttgttttagggcgactgccctgctgcgtaacatcgttgctgctgcgtaacatcgttgctgctccataacatcaaacatcgacccacggcgtaacgcgcttgctgcttggatgcccgaggcatagactgtacaaaaaaacagtcataacaagccatgaaaaccgccactgcgccgttaccaccgctgcgttcggtcaaggttctggaccagttgcgtgagcgcatacgctacttgcattacagtttacgaaccgaacaggcttatgtcaactgggttcgtgccttcatccgtttccacggtgtgcgtcacccggcaaccttgggcagcagcgaagtcgaggcatttctgtcctggctggcgaacgagcgcaaggtttcggtctccacgcatcgtcaggcattggcggccttgctgttcttctacggcaaggtgctgtgcacggatctgccctggcttcaggagatcggtagacctcggccgtcgcggcgcttgccggtggtgctgaccccggatgaagtggttcgcatcctcggttttctggaaggcgagcatcgtttgttcgcccaggactctagctatagttctagtggttggcctacgtacccgtagtggctatggcagggcttgccgccccgacgttggctgcgagccctgggccttcacccgaacttgggggttggggtggggaaaaggaagaaacgcgggcgtattggtcccaatggggtctcggtggggtatcgacagagtgccagccctgggaccgaaccccgcgtttatgaacaaacgacccaacacccgtgcgttttattctgtctttttattgccgtcatagcgcgggttccttccggtattgtctccttccgtgtttcagttagcctcccccatctcccggtaccgcatgctatgcatcggccgctttacttgtacagctcgtccatgccgagagtgatcccggcggcggtcacgaactccagcaggaccatgtgatcgcgcttctcgttggggtctttgctcagggcggactgggtgctcaggtagtggttgtcgggcagcagcacggggccgtcgccgatgggggtgttctgctggtagtggtcggcgagctgcacgctgccgtcctcgatgttgtggcggatcttgaagttcaccttgatgccgttcttctgcttgtcggccatgatatagacgttgtggctgttgtagttgtactccagcttgtgccccaggatgttgccgtcctccttgaagtcgatgcccttcagctcgatgcggttcaccagggtgtcgccctcgaacttcacctcggcgcgggtcttgtagttgccgtcgtccttgaagaagatggtgcgctcctggacgtagccttcgggcatggcggacttgaagaagtcgtgctgcttcatgtggtcggggtagcggctgaagcactgcacgccgtaggtcagggtggtcacgagggtgggccagggcacgggcagcttgccggtggtgcagatgaacttcagggtcagcttgccgtaggtggcatcgccctcgccctcgccggacacgctgaacttgtggccgtttacgtcgccgtccagctcgaccaggatgggcaccaccccggtgaacagctcctcgcccttgctcaccatggctcgagatcccgggcgtttaaattgtgtaatttatgtagctgtaatttttaccttattaatattttttacgctttgcattcgacgactgaactcccaaatatatgtttaactcgtcttggtcgtttgaatttttgttgctgtgtttcctaatattttccatcaccttaaatatgttattgtaatcctcaatgttgaacttgcaattggacacggcatagttttccatagtcgtgtaaaacatggtattggctgcattgtaatacatccgactgagcgggtacggatctatgtgtttgagcagcctgttcaaaaactctgcatcgtcgcaaaacggaatttggtacccgggcgtatactccggaatattaatagatcatggagataattaaaatgataaccatctcgcaaataaataagtattttactgttttcgtaacagttttgtaataaaaaaacctataaatattccggattattcataccgtcccaccatcgggcgccatggatcccggtccgaagcgcgcggaattcaaaggcctacgtcgacgagctcactagtcgcggccgctttcgaatctagagcctgcagtctcgacaagcttgtcgagaagtactagaggatcataatcagccataccacatttgtagaggttttacttgctttaaaaaacctcccacacctccccctgaacctgaaacataaaatgaatgcaattgttgttgttaacttgtttattgcagcttataatggttacaaataaagcaatagcatcacaaatttcacaaataaagcatttttttcactgcattctagttgtggtttgtccaaactcatcaatgtatcttatcatgtctggatctgatcactgcttgagcctaggagatccgaaccagataagtgaaatctagttccaaactattttgtcatttttaattttcgtattagcttacgacgctacacccagttcccatctattttgtcactcttccctaaataatccttaaaaactccatttccacccctcccagttcccaactattttgtccgcccacagcggggcatttttcttcctgttatgtttttaatcaaacatcctgccaactccatgtgacaaaccgtcatcttcggctacttt

SEQ ID NO: 15 - protein, 570 aa, Newcastle disease virus
MNRAVCQVALENDEREAKNTWRLVFRIAILLLTVMTLAISAAALAYSMEASTPGDLVSIPTAISRAEGKITSALGSNQDVVDRIYKQVALESPLALLNTESIIMNAITSLSYQINGAANNSGCGAPVHDPDYIGGIGKELIVDDTSDVTSFYPSAFQEHLNFIPAPTTGSGCTRIPSFDMSATHCYTHNVIFSGCRHHSHSHQYLALGVLRTSATGRVFFSTLRSINLDDTQNRKSCSVSATPLGCDMLCSKVTETEEQDYNSVIPTSMVHGRLGFDGQYHEKDLDVTTLFGDWVANYPGVGGGSFIDNRVWFPVYGGLKPSSPSDTGQEGRYVIYKRYNDTCPDEQDYQIRMAKSSYKPGRFGGKRVQQAILSIKVSTSLGEDPVLTIPPNTVTLMGAEGRVLTVGTSHFLYQRGSSYFSPALLYPMTVNNNTATLHSPYTFNAFTRPGSVPCQASARCPNSCVTGVYTDPYPLVFHRNHTLRGVFGTMLDDEQARLNLVSAVFDNISRSRITRVSSSRTKAAYTTSTCFKVVKTNKTYCLSIAEISNTLFGEFRIVPLLVEILKDDGV

SEQ ID NO: 16 - DNA, 1993 bp, Newcastle disease virus
acgggtagaacggtcggagaggccacccctcaatcgggagtcggacctcacaacttccattctgccgcatcaccagtagcggtcttcagtcatgaaccgcgcagtttgccaagttgcgctagagaatgatgaaagggaagcgaagaatacatggcgcttggtattccggatcgcaatcttacttttaacagtaatgaccttagccatctctgcagccgccctggcatatagtatggaggctagcacacctggcgaccttgtaagcataccaactgcgatctctagggcagagggaaagattacatctgcactcggttccaatcaggatgtagtagataggatatacaagcaggtggctcttgaatctccgttggcattgctaaacaccgaatctataattatgaatgcaataacatccctctcttatcaaatcaatggagctgcaaataacagcgggtgtggggcacctgttcatgacccagattacatcggggggataggtaaagaacttattgtggatgatactagtgatgtcacatcattctatccctctgcgttccaagaacacctgaattttatcccggcacccactacaggatcaggttgcactcggataccctcattcgacatgagtgctacccactgttatactcacaatgtgatattttctggttgcagacaccattcacactcacatcagtatttagcactgggtgtgcttcggacatctgcaacagggagggtattcttttctaccctgcgttccatcaatttggatgacacccaaaatcggaagtcttgcagtgtgagtgcaactcccttaggttgtgatatgctgtgctctaaagtcacagagactgaggaacaggattataattcagttatccccacatcgatggtacatggaaggttagggtttgacggccaataccatgagaaggacctagacgtcacaacattatttggggactgggtggcaaattacccaggagtgggaggtgggtcttttattgacaaccgcgtatggttcccagtctacggagggctaaaacccagttcgcctagtgacactggacaagaagggagatatgtaatatataagcgatacaatgacacatgcccagatgagcaagattaccagattcggatggctaagtcttcgtataagcctgggcggtttggtggaaagcgtgtacagcaggccatcttatctatcaaggtgtcaacatccttgggtgaggacccggtgctgactataccgcccaacacagtcacactcatgggggccgaaggcagagttctcacagtagggacatctcatttcttgtaccagcgagggtcatcatatttctctcctgctttattataccctatgacagtcaacaacaacacagccactcttcatagtccttatacattcaatgctttcactcggccaggtagtgtcccttgccaggcttcagcaagatgccctaactcatgtgtcactggggtctatactgatccatatcccttagtcttccataggaaccacaccttgcgaggggtattcgggacaatgcttgatgatgaacaagcaagactcaaccttgtatctgcagtatttgataacatatcccgcagtcgcataacccgggtaagttcaagcagaaccaaggcagcatacacgacatcaacgtgttttaaagttgtcaagaccaataaaacctattgcctcagcattgcagaaatatccaataccctctttggggaattcaggatcgtccctttactagttgagattctcaaggatgatggggtttagaaagccaggtctagccggttgagccaactgtgagagggttggaaagatgacattgtgtcacctatcttttgtagcgccaagaatcaaactgaataccggccacgagctcgaatcctccgctgccagtcggtcataatcactagtgctaatgtgattagtctgaatcttgtcgatagtcacttgattaag

SEQ ID NO: 17 - protein, 577 aa, Newcastle disease virus
MDRAVSQVALENDEREAKNTWRLIFRIAILFLTVVTLAISVASLLYSMGASTPSDLVGIPTRISRAEEKITSTLGSNQDVVDRIYKQVALESPLALLNTETTIMNAITSLSYQINGAANNSGWGAPIHDPDYIGGIGKELIVDDASDVTSFYPSAFQEHLNFIPAPTTGSGCTRIPSFDMSATHYCYTHNVILSGCRDHSHSHQYLALGVLRTSATGRVFFSTLRSINLDDTQNRKSCSVSATPLGCDMLCSKATETEEEDYNSAVPTRMVHGRLGFDGQYHEKDLDVTTLFGDWVANYPGVGGGSFIDSRVWFSVYGGLKPNTPSDTVQEGKYVIYKRYNDTCPDEQDYQIRMAKSSYKPGRFGGKRIQQAILSIKVSTSLGEDPVLTVPPNTVTLMGAEGRILTVGTSHFLYQRGSSYFSPALLYPMTVSNKTATLHSPYTFNAFTRPGSIPCQASARCPNSCVTGVYTDPYPLIFYRNHTLRGVFGTMLDGEQARLNPASAVFDSTSRSRITRVSSSSIKAAYTTSTCFKVVKTNKTYCLSIAEISNTLFGEFRIVPLLVEILKDDGVREARSG

SEQ ID NO: 18 - DNA, 1734 bp, Newcastle disease virus
atggaccgcgccgttagccaagttgcgttagagaatgatgaaagagaggcaaaaaatacatggcgcttgatattccggattgcaatcttattcttaacagtagtgaccttggctatatctgtagcctcccttttatatagcatgggggctagcacacctagcgatcttgtaggcataccgactaggatttccagggcagaagaaaagattacatctacacttggttccaatcaagatgtagtagataggatatataagcaagtggcccttgagtctccattggcattgttaaatactgagaccacaattatgaacgcaataacatctctctcttatcagattaatggagctgcaaacaacagcgggtggggggcacctattcatgacccagattatataggggggataggcaaagaactcattgtagatgatgctagtgatgtcacatcattctatccctctgcatttcaagaacatctgaattttatcccggcgcctactacaggatcaggttgcactcgaataccctcatttgacatgagtgctacccattactgctacacccataatgtaatattgtctggatgcagagatcactcacactcacatcagtatttagcacttggtgtgctccggacatctgcaacagggagggtattcttttctactctgcgttccatcaacctggacgacacccaaaatcggaagtcttgcagtgtgagtgcaactcccctgggttgtgatatgctgtgctcgaaagccacggagacagaggaagaagattataactcagctgtccctacgcggatggtacatgggaggttagggttcgacggccaatatcacgaaaaggacctagatgtcacaacattattcggggactgggtggccaactacccaggagtagggggtggatcttttattgacagccgcgtatggttctcagtctacggagggttaaaacccaatacacccagtgacactgtacaggaagggaaatatgtgatatacaagcgatacaatgacacatgcccagatgagcaagactaccagattcgaatggccaagtcttcgtataagcctggacggtttggtgggaaacgcatacagcaggctatcttatctatcaaagtgtcaacatccttaggcgaagacccggtactgactgtaccgcccaacacagtcacactcatgggggccgaaggcagaattctcacagtagggacatcccatttcttgtatcagcgagggtcatcatacttctctcccgcgttattatatcctatgacagtcagcaacaaaacagccactcttcatagtccttatacattcaatgccttcactcggccaggtagtatcccttgccaggcttcagcaagatgccccaactcgtgtgttactggagtctatacagatccatatcccctaatcttctatagaaaccacaccttgcgaggggtattcgggacaatgcttgatggtgaacaagcaagacttaaccctgcgtctgcagtattcgatagcacatcccgcagtcgcataactcgagtgagttcaagcagcatcaaagcagcatacacaacatcaacttgttttaaagtggtcaagaccaataagacctattgtctcagcattgctgaaatatctaatactctcttcggagaattcagaatcgtcccgttactagttgagatcctcaaagatgacggggttagagaagccaggtctggctag

SEQ ID NO: 19 - protein, 553 aa, Newcastle disease virus
MGPRSSTRIPIPLMLTIRIALALSCVHLASSLDGRPLAAAGIVVTGDKAVNIYTSSQTGSIIVKLLPNMPKDKEACAKAPLEAYNRTLTTLLTPLGDSIRRIQESVTTSGGRRQKRFIGAIIGSVALGVATAAQITAASALIQANQNAANILRLKESITATNEAVHEVTDGLSQLAVAVGKMQQFVNDQFNNTAQELDCIKITQQVGVELNLYLTELTTVFGPQITSPALTQLTIQALYNLAGGNMDYLLTKLGVGNNQLSSLIGSGLITGNPILYDSQTQLLGIQVTLPSVGNLNNMRATYLETLSVSTTKGFASALVPKVVTQVGSVIEELDTSYCIETDLDLYCTRIVTFPMSPGIYSCLNGNTSACMYSKTEGALTTPYMTLKGSVIANCKMTTCRCADPPGIISQNYGEAVSLIDRHSCNVLSLDGITLRLSGEFDATYQKNISILDSQVIVTGNLDISTELGNVNNSISNALDKLEESNSKLDKVNVKLTSTSALITYIALTAISLVCGILSLVLACYLMYKQKAQQKTLLWLGNNTLGQMRATTKM

SEQ ID NO: 20 - DNA, 1759 bp, Newcastle disease virus
acgggtagaagagtttggatcccggttggcgcattcaaggcgcaagatgggccccagatcttctaccaggatcccaatacctctgatgttgaccatccggatcgcgctggcactgagttgtgtccatctggcaagttctcttgatggcaggcctcttgcagctgcagggatcgtggtaacaggggataaagcagtcaacatatacacctcatcccagacagggtcaatcatagtcaagttactcccaaatatgcccaaggataaagaggcgtgtgcaaaagccccgttggaggcatacaacaggacactgactactttgctcaccccccttggtgattctatccgcaggatacaagagtctgtgactacatccggaggaaggagacagaaacgctttataggtgctattatcggcagtgtagctcttggggttgcaacagctgcacagataacagcagcctcggccctgatacaagccaatcagaatgctgccaacatcctccggcttaaggagagcattactgcaaccaatgaagctgtacatgaggtcactgacggattatcacaactagcagtggcagttgggaagatgcagcagtttgttaatgaccagtttaataacacagctcaggaattggactgtataaaaattacacagcaggttggtgtagaactcaacctgtacctaactgaattgactacagtattcgggccacaaataacttcccctgccttaactcagctgactatccaggcgctttacaacctagctggtggtaatatggattacttgttgactaagttaggtgtagggaacaaccaactcagctcattaattggtagcggcttgatcaccggcaaccctattctgtacgactcacagactcaactcttgggtatacaggtaactttaccctcagtcggaaacctaaataatatgcgtgccacctacctggagaccttgtctgtaagcacaaccaagggatttgcctcagcactcgtcccaaaagtggtgacacaggtcggttctgtgatagaagaacttgacacttcatactgtatagagaccgatttggatttgtattgtacaagaatagtgacattccctatgtctcctggtatttattcctgtttgaacggcaatacatcggcttgcatgtattcaaagactgaaggcgcacttactacgccatacatgactctcaaaggctcagttattgccaattgcaagatgacaacatgcagatgtgcagaccccccgggtatcatatcgcaaaattatggagaagctgtgtctctaatagataggcactcatgcaatgtcttatccttggacgggataactttgaggctcagtggggaatttgatgcaacttatcaaaagaatatctcaatactagattctcaagtaatagtgacaggcaatctcgatatctcaactgagcttgggaatgtcaacaactcgataagtaatgctttggataagttagaggaaagcaacagcaaactagacaaagtcaatgtcaaactgaccagcacatctgctctcattacctatatcgctttaactgccatatctcttgtttgcggtatacttagtctggttctagcatgctacctaatgtacaagcaaaaggcgcaacaaaagaccttgttatggcttgggaataataccctgggtcagatgagagccactacaaaaatgtgaatgcagatgagaggcggaggtatccccaatagcaatttgtgtgcaaattct

SEQ ID NO: 21 - protein, 553 aa, Newcastle disease virus
MGSRPFTKNPAPMMLTIRVALVLSCICPANSIDGRPFAAAGIVVTGDKAVNIYTSSQTGSIIVKLLPNLPKDKEACAKAPLDAYNRTLTTLLTPLGDSIRRIQESVTTSGGGRQGRLIGAIIGGVALGVATAAQITAAAALIQAKQNAANILRLKESIAATNEAVHEVTDGLSQLAVAVGKMQQFVNDQFNKTAQELDCIKIAQQVGVELNLYLTELTTVFGPQITSPALNKLTIQALYNLAGGNMDYLLTKLGIGNNQLSSLIGSGLITGNPILYDSQTQLLGIQVTLPSVGNLNNMRATYLETLSVSTTRGFASALVPKVVTQVGSVIEELDTSYCIETDLDLYCTRIVTFPMSPGIYSCLSGNTSACMYSKTEGALTTPYMTIKGSVIANCKMTTCRCVNPPGIISQNYGEAVSLIDKQSCNVLSLGGITLRLSGEFDVTYQKNISIQDSQVIITGNLDISTELGNVNNSISNALNKLEESNRKLDKVNVKLTSTSALITYIVLTIISLVFGILSLILACYLMYKQKAQQKTLLWLGNNTLDQMRATTKM

SEQ ID NO: 22 - protein, 489 aa, Newcastle disease virus
MSSVFDEYEQLLAAQTRPNGAHGGGEKGSTLKVDVPVFTLNSDDPEDRWSFVVFCLRIAVSEDANKPLRQGALISLLCSHSQVMRNHVALAGKQNEATLAVLEIDGFANGTPQFNNRSGVSEERAQRFAMIAGSLPRACSNGTPFVTAGAEDDAPEDITDTLERILSIQAQVWVTVAKAMTAYETADESETRRINKYMQQGRVQKKYILYPVCRSTIQLTIRQSLAVRIFLVSELKRGRNTAGGTSTYYNLVGDVDSYIRNTGLTAFFLTLKYGINTKTSALALSSLSGDIQKMKQLMRLYRMKGDNAPYMTLLGDSDQMSFAPAEYAQLYSFAMGMASVLDKGTGKYQFAKDFMSTSFWRLGVEYAQAQGSSINEDMAAELKLTPAARRGLAAAAQRVSEVTSSIDMPTQQVGVLTGLSEGGSQALQGGSNRSQGQPEAGDGETQFLDLMRAVANSMREAPNSAQGTPQSGPPPTPGPSQDNDTDWGY

SEQ ID NO: 23 - DNA, 1535 bp, Newcastle disease virus
gccaaaatgtcttccgtattcgacgagtacgaacagctcctcgcggctcagactcgccccaatggagctcatggagggggggagaaagggagtaccttaaaagtagacgtcccggtattcactcttaacagtgatgacccagaagataggtggagctttgtggtattctgcctccggattgctgttagcgaagatgccaacaaaccactcaggcaaggtgctctcatatctcttttatgctcccactcacaggtaatgaggaaccatgttgcccttgcagggaaacagaatgaagccacattggccgtgcttgagattgatggctttgccaacggcacgccccagttcaacaataggagtggagtgtctgaagagagagcacagagatttgcgatgatagcaggatctctccctcgggcatgcagcaacggcaccccgttcgtcacagccggggctgaagatgatgcaccagaagacatcaccgataccctggagaggatcctctctatccaggctcaagtatgggtcacagtagcaaaagccatgactgcgtatgagactgcagatgagtcggaaacaaggcgaatcaataagtatatgcagcaaggcagggtccaaaagaaatacatcctctaccccgtatgcaggagcacaatccaactcacgatcagacagtctcttgcagtccgcatctttttggttagcgagctcaagagaggccgcaacacggcaggtggtacctctacttattataacctagtaggggacgtagactcatatatcaggaataccgggcttactgcattcttcttgacactcaagtacggaatcaacaccaagacatcagcccttgcacttagtagcctctcaggcgacatccagaagatgaagcagctcatgcgtttgtatcggatgaaaggagataatgcgccgtacatgacattacttggtgatagtgaccagatgagctttgcgcctgccgagtatgcacaactttactcctttgccatgggtatggcatcagtcctagataaaggtactgggaaataccaatttgccaaggactttatgagcacatcattctggagacttggagtagagtacgctcaggctcagggaagtagcattaacgaggatatggctgccgagctaaagctaaccccggcagcaaggaggggcctggcagctgctgcccaacgagtctccgaggtgaccagcagcatagacatgcctactcaacaagtcggagtcctcactgggcttagcgaggggggatcccaagccctacaaggcggatcgaatagatcgcaagggcaaccagaagccggggatggggagacccaattcctggatctgatgagagcggtagcaaatagcatgagggaggcgccaaactctgcacagggcactccccaatcggggcctcccccaactcctgggccatcccaagataacgacaccgactgggggtattgattgacaaaacccagcctgcttctacaagaacatcccaatgctctcacccgtagtcgacc

SEQ ID NO: 24 - protein, 364 aa, Newcastle disease virus
MDSSRTIGLYFDSALPSSNLLAFPIVLQDIGDGKKQIAPQYRIQRLDSWTDSKEDSVFITTYGFIFQVGNEEVTVGMISDNPKHELLSAAMLCLGSVPNVGDLVELARACLTMVVTCKKSATDTERMVFSVVQAPQVLQSCRVVANKYSSVNAVKHVKAPEKIPGSGTLEYKVNFVSLTVVPRKDVYKIPTAALKVSGSSLYNLALNVTIDVEVDPKSPLVKSLSKSDSGYYANLFLHIGLMSTVDKKGKKVTFDKLERKIRRLDLSVGLSDVLGPSVLVKARGARTRLLAPFFSSSGTACYPISNASPQVAKILWSQTARLRSVKVIIQAGTQRAVAVTADHEVTSTKIEKRHTIAKYNPFKK

SEQ ID NO: 25 - DNA, 1210 bp, Newcastle disease virus
acgggtagaatcggagtgccctgattgtgccaagatggactcatctaggacaatagggctatactttgattctgcccttccttctagcaacctgttagcattcccgatcgtcctacaagacataggagatgggaagaagcaaatcgccccgcaatataggatccagcgtcttgactcgtggacagacagtaaagaagactcggtattcatcaccacctatggattcatcttccaggttgggaatgaagaagtcactgtcggcatgatcagcgataatcccaagcacgagttactttcagctgcgatgctctgcctaggaagtgtcccgaatgtcggagatcttgttgagttggcaagggcctgcctcactatggtggtaacatgcaagaagagtgcaactgatactgagagaatggtcttctcggtagtacaggcgccccaggtgctgcaaagctgtagggtcgtggcaaacaaatactcgtcagtgaatgcagttaagcacgtgaaagcaccagagaagatccctgggagcggaaccctagagtacaaggtgaattttgtctctttgactgtggtgccaaggaaggatgtctacaaaatcccaaccgcagcattgaaggtatctggctcgagcctgtacaatcttgcgctcaatgtcactattgatgtggaggtagacccaaagagcccgttagtcaaatctctttcaaagtccgacagtggatactatgctaatcttttcttacatatcggacttatgtccactgtagataagaagggaaagaaagtgacatttgacaagctggagaggaagataagaagactcgatttatctgtcgggctcagtgatgtgctcggaccttccgtgcttgtgaaggcgagaggtgcacggactaggctgctggcacctttcttctctagcagtgggacagcctgctatcctatatcaaatgcctctcctcaggtagctaagatactctggagtcaaactgcgcgcctgcggagtgtaaaagtcattattcaagcgggcacccaacgcgctgtcgcggtgaccgctgaccacgaggtcacctctactaagatagaaaagaggcataccattgctaaatacaatccttttaagaaataagctgcatctctgagactgcaatccgcccgctttcccgaatcatcacgacgcttaataatggatctgtcctgattactcaca

SEQ ID NO: 26 - protein, 364 aa, Newcastle disease virus
MDSSRTIGLYFDSAHSSSNLLAFPIVLQDTGDGKKQIAPQYRIQRLDSWTDSKEDSVFITTYGFIFQVGNEEATVGMIDDKPKRELLSAAMLCLGSVPNTGDLVELTRACLTMMVTCKKSATNTERMVFSVVQAPQVLQSCRVVPNKYSSVNAVKHVKAPEKIPGSGTLEYKVNFVSLTVVPKKDVYKIPAAVLKISGSSLYNLALNVTINVEVDPRSPLVKSLSKSDSGYYANLFLHIGLMTTVDRKGKKVTFDKLEKKIRSLDLSVGLSDVLGPSVLVKARGARTKLLAPFFSSSGTACYPIANASPQVAKILWSQTACLRSVKIIIQAGTQRAVAVTADHEVTSTKLEKGHTLAKYNPFKK

SEQ ID NO: 27 - DNA, 1223 bp, Newcastle disease virus
tgtgccaagatggactcatctaggacaattgggctgtactttgattctgcccattcttctagcaacctgttagcatttccgatcgtcctacaagacacaggagatgggaagaagcaaatcgccccgcaatataggatccagcgccttgactcgtggactgatagtaaggaagactcagtattcatcaccacctatggattcatctttcaagttgggaatgaggaagccactgtcggcatgatcgatgataaacccaagcgcgagttactttccgctgcgatgctctgcctaggaagcgtcccaaataccggagaccttgttgagctgacaagggcctgtctcactatgatggtcacatgcaagaagagtgcaactaatactgagagaatggttttctcagtagtgcaggcaccccaagtgctgcaaagctgtagggttgtgccaaacaaatactcatcagtgaatgcagtcaagcacgtgaaagcgccagagaagatccccgggagtggaaccctagaatacaaggtgaactttgtctccttgactgtggtaccgaagaaggatgtctacaagatcccagctgcagtattgaagatttctggctcgagtctgtacaatcttgcgctcaatgtcactattaatgtggaggtagacccgaggagtcctttggttaaatctctgtctaagtctgacagcggatactatgctaacctcttcttgcatattggacttatgaccaccgtagataggaaggggaagaaagtgacatttgacaagctggaaaagaaaataaggagccttgatctatctgtcgggctcagtgatgtgctcgggccttccgtgttggtaaaagcaagaggtgcacggactaagcttttggcacctttcttctctagcagtgggacagcctgctatcccatagcaaatgcttctcctcaggtggccaagatactctggagccaaaccgcgtgcctgcggagcgttaaaatcattatccaagcaggtacccaacgcgctgtcgcagtgaccgctgaccacgaggttacctctactaagctggagaaggggcacacccttgccaaatacaatccttttaagaaataagctgcgtctctgagattgcgctccgcccactcacccagatcatcatgacacaaaaaactaatctgtcttgattatttacagttagtttacctgtccatcaagttagaaaaaacacgggt

SEQ ID NO: 28 - DNA, 15186 bp, Newcastle disease virus B1
accaaacagagaatcggtgagttacgataaaaggcgaaggagcaattgaagtcgcacgggtagaaggtgtgaatctcgagtgcgagcccgaagcacaaactcgaggaagccttctgccaacatgtcttccgtattcgacgagtacgaacagctcctcgcggctcagactcgccccaatggagctcatggagggggggagaaagggagtaccttaaaagtagacgtcccggtattcactcttaacagtgatgacccagaagataggtggagctttgtggtattctgcctccggattgctgttagcgaagatgccaacaaaccactcaggcaaggtgctctcatatctcttttatgctcccactcacaggtaatgaggaaccatgttgcccttgcagggaaacagaatgaagccacattggccgtgcttgagattgatggctttgccaacggcacgccccagttcaacaataggagtggagtgtctgaagagagagcacagagatttgcgatgatagcaggatctctccctcgggcatgcagcaacggcaccccgttcgtcacagccggggctgaagatgatgcaccagaagacatcaccgataccctggagaggatcctctctatccaggctcaagtatgggtcacagtagcaaaagccatgactgcgtatgagactgcagatgagtcggaaacaaggcgaatcaataagtatatgcagcaaggcagggtccaaaagaaatacatcctctaccccgtatgcaggagcacaatccaactcacgatcagacagtctcttgcagtccgcatctttttggttagcgagctcaagagaggccgcaacacggcaggtggtacctctacttattataacctagtaggggacgtagactcatatatcaggaataccgggcttactgcattcttcttgacactcaagtacggaatcaacaccaagacatcagcccttgcacttagtagcctctcaggcgacatccagaagatgaagcagctcatgcgtttgtatcggatgaaaggagataatgcgccgtacatgacattacttggtgatagtgaccagatgagctttgcgcctgccgagtatgcacaactttactcctttgccatgggtatggcatcagtcctagataaaggtactgggaaataccaatttgccaaggactttatgagcacatcattctggagacttggagtagagtacgctcaggctcagggaagtagcattaacgaggatatggctgccgagctaaagctaaccccggcagcaaggaggggcctggcagctgctgcccaacgagtctccgaggtgaccagcagcatagacatgcctactcaacaagtcggagtcctcactgggcttagcgaggggggatcccaagccctacaaggcggatcgaatagatcgcaagggcaaccagaagccggggatggggagacccaattcctggatctgatgagagcggtagcaaatagcatgagggaggcgccaaactctgcacagggcactccccaatcggggcctcccccaactcctgggccatcccaagataacgacaccgactgggggtattgattgacaaaacccagcctgcttctacaagaacatcccaatgctctcacccgtagtcgacccctcgatttgcggctctatatgaccacaccctcaaacaaacatccccctctttcctccctccccctgctgtacaactccgcacgccctaggcaacagaggcacaatgcggctcactaacaatcaaaacagagccgagggaattagaaaaaagtacgggtagaagagggatattcagagatcagggcaagtctcccgagtctctgctctctcctctacctgatagaccaggacaaacatggccacctttacagatgcagagatcgacgagctatttgagacaagtggaactgtcattgacaacataattacagcccagggtaaaccagcagagactgttggaaggagtgcaatcccacaaggcaagaccaaggtgctgagcgcagcatgggagaagcatgggagcatccagccaccggccagtcaagacaaccccgatcgacaggacagatctgacaaacaaccatccacacccgagcaaacgaccccgcatgacagcccgccggccacatccgctgaccagccccccacccaggccacagacgaagccgtcgacacacagctcaggaccggagcaagcaactctctgctgttgatgcttgacaagctcagcaataaatcgtccaatgctaaaaagggcccatggtcgagcccccaagaggggaatcaccaacgtccgactcaacagcaggggagtcaacccagtcgcggaaacagtcaggaaagaccgcagaaccaagtcaaggccgcccctggaaaccagggcacagacgtgaacacagcatatcatggacaatgggaggagtcacaactatcagctggtgcaacccctcatggtctccgatcaaagcagagccaaaacaatacccctgtttctgcggatcatttccacccacctgtagactttgtgcaagcgatgatgtctattatggaggggatttcccaaagagtaagtaaggttgcctatcaggtagatcttgtttttaaacagacatcctccatccctatgatggggtccgaaatccaacagctgaaaacatttgttgcagtcatggaagccaacttgggaatgatgaagattttggatcccggttgtgccaacatttcatctttgagtgatctacgggcagttgcccgatctcacccggttttagtttcaggccctggagacccatctccctatgtgatacaaggaggcgaaatggcacttaataaactttcgcaaccagtgccacatccatctgaattgattaaacccgccactgcatgcgggcctgatataggagtggagagggacactgtccgtgcattgatcatgtcacgcccaatgcacccgagttcttcagccaagctcctaagcaagttagatgcagccgggtcgatcgaggaaatcaggaaaatcaagcgccttgctctaaatggctaattactactgccacacgtagcgggtccctgtccactcggcatcacacggaatctgcaccgagttcccccccgcagacccaaggtccaactctccaagcggcaatcctctctcgcttcctcagccccactgaatgatcgcgcaaccgcaattaatctagctacattaaggattaagaaaaaatacgggtagaattggagtgccccaattgtgccaagatggactcatctaggacaattgggctgtactttgattctgcccattcttctagcaacctgttagcatttccgatcgtcctacaagacacaggagatgggaagaagcaaatcgccccgcaatataggatccagcgccttgacttgtggactgatagtaaggaagactcagtattcatcaccacctatggattcatctttcaagttgggaatgaagaagccactgtcggcattatcgatgataaacccaagcgcgagttactttccgctgcgatgctctgcctaggaagcgtcccaaataccggagaccttattgagctggcaagggcctgtctcactatgatggtcacatgcaagaagagtgcaactaatactgagagaatggttttctcagtagtgcaggcaccccaagtgctgcaaagctgtagggttgtggcaaacaaatactcatcagtgaatgcagtcaagcacgtgaaagcgccagagaagatccccgggagtggaaccctagaatacaaggtgaactttgtctccttgactgtggtaccgaagaaggatgtctacaagatcccagctgcagtattgaagatttctggctcgagtctgtacaatcttgcgctcaatgtcactattaatgtggaggtagacccgaggagtcctttggttaaatctctgtctaagtctgacagcggatactatgctaacctcttcttgcatattggacttatgaccaccgtagataggaaggggaagaaagtgacatttgacaagctggaaaagaaaataaggagccttgatctatctgtcgggctcagtgatgtgctcgggccttccgtgttggtaaaagcaagaggtgcacggactaagcttttggcacctttcttctctagcagtgggacagcctgctatcccatagcaaatgcttctcctcaggtggccaagatactctggagtcaaaccgcgtgcctgcggagcgttaaaatcattatccaagcaggtacccaacgcgctgtcgcagtgaccgctgaccacgaggttacctctactaagctggagaaggggcacacccttgccaaatacaatccttttaagaaataagctgcgtctctgagattgcgctccgcccactcacccagatcatcatgacacaaaaaactaatctgtcttgattatttacagttagtttacctgtccatcaagttagaaaaaacacgggtagaagactctggatcccggttggcgccctccaggtgcaggatgggctccagaccttttaccaagaacccagcacctatgatgctgactatccgggtcgcgctggtattgagttgcatctgtccggcaaactccattgatggcaggccttttgcagctgcaggaattgtggttacaggagacaaagcagtcaacatatacacctcatcccagacaggatcaatcatagttaagctcctcccgaatctgcccaaggataaggaggcatgtgcgaaagcccccttggatgcatacaacaggacattgaccactttgctcaccccccttggtgactctatccgtaggatacaagagtctgtgactacatctggaggggggagacaggggcgccttataggcgccattattggcggtgtggctcttggggttgcaactgccgcacaaataacagcggccgcagctctgatacaagccaaacaaaatgctgccaacatcctccgacttaaagagagcattgccgcaaccaatgaggctgtgcatgaggtcactgacggattatcccaactagcagtggcagttgggaagatgcagcagtttgttaatgaccaatttaataaaacagctcaggaattagactgcataaaaattgcacagcaagttggtgtagagctcaacctgtacctaaccgaattgactacagtattcggaccacaaatcacttcacctgccttaaacaagctgactattcaggcactttacaatctagctggtgggaatatggattacttattgactaagttaggtatagggaacaatcaactcagctcattaatcggtagcggcttaatcaccggtaaccctattctatacgactcacagactcaactcttgggtatacaggtaactctaccttcagtcgggaacctaaataatatgcgtgccacctacttggaaaccttatccgtaagcacaaccaggggatttgcctcggcacttgtcccaaaagtggtgacacaggtcggttctgtgatagaagaacttgacacctcatactgtatagaaactgacttagatttatattgtacaagaatagtaacgttccctatgtcccctggtatttactcctgcttgagcggcaatacatcggcctgtatgtactcaaagaccgaaggcgcacttactacaccatatatgactatcaaaggctcagtcatcgctaactgcaagatgacaacatgtagatgtgtaaaccccccgggtatcatatcgcaaaactatggagaagccgtgtctctaatagataaacaatcatgcaatgttttatccttaggcgggataactttaaggctcagtggggaattcgatgtaacttatcagaagaatatctcaatacaagattctcaagtaataataacaggcaatcttgatatctcaactgagcttgggaatgtcaacaactcgatcagtaatgctttgaataagttagaggaaagcaacagaaaactagacaaagtcaatgtcaaactgaccagcacatctgctctcattacctatatcgttttgactatcatatctcttgtttttggtatacttagcctgattctagcatgctacctaatgtacaagcaaaaggcgcaacaaaagaccttattatggcttgggaataataccctagatcagatgagagccactacaaaaatgtgaacacagatgaggaacgaaggtttccctaatagtaatttgtgtgaaagttctggtagtctgtcagttcggagagttaagaaaaaactaccggttgtagatgaccaaaggacgatatacgggtagaacggtaagagaggccgcccctcaattgcgagccagacttcacaacctccgttctaccgcttcaccgacaacagtcctcaatcatggaccgcgccgttagccaagttgcgttagagaatgatgaaagagaggcaaaaaatacatggcgcttgatattccggattgcaatcttattcttaacagtagtgaccttggctatatctgtagcctcccttttatatagcatgggggctagcacacctagcgatcttgtaggcataccgactaggatttccagggcagaagaaaagattacatctacacttggttccaatcaagatgtagtagataggatatataagcaagtggcccttgagtctccattggcattgttaaatactgagaccacaattatgaacgcaataacatctctctcttatcagattaatggagctgcaaacaacagcgggtggggggcacctattcatgacccagattatataggggggataggcaaagaactcattgtagatgatgctagtgatgtcacatcattctatccctctgcatttcaagaacatctgaattttatcccggcgcctactacaggatcaggttgcactcgaataccctcatttgacatgagtgctacccattactgctacacccataatgtaatattgtctggatgcagagatcactcacactcatatcagtatttagcacttggtgtgctccggacatctgcaacagggagggtattcttttctactctgcgttccatcaacctggacgacacccaaaatcggaagtcttgcagtgtgagtgcaactcccctgggttgtgatatgctgtgctcgaaagccacggagacagaggaagaagattataactcagctgtccctacgcggatggtacatgggaggttagggttcgacggccaatatcacgaaaaggacctagatgtcacaacattattcggggactgggtggccaactacccaggagtagggggtggatcttttattgacagccgcgtatggttctcagtctacggagggttaaaacccaattcacccagtgacactgtacaggaagggaaatatgtgatatacaagcgatacaatgacacatgcccagatgagcaagactaccagattcgaatggccaagtcttcgtataagcctggacggtttggtgggaaacgcatacagcaggctatcttatctatcaaagtgtcaacatccttaggcgaagacccggtactgactgtaccgcccaacacagtcacactcatgggggccgaaggcagaattctcacagtagggacatcccatttcttgtatcagcgagggtcatcatacttctctcccgcgttattatatcctatgacagtcagcaacaaaacagccactcttcatagtccttatacattcaatgccttcactcggccaggtagtatcccttgccaggcttcagcaagatgccccaactcgtgtgttactggagtctatacagatccatatcccctaatcttctatagaaaccacaccttgcgaggggtattcgggacaatgcttgatggtgaacaagcaagacttaaccctgcgtctgcagtattcgatagcacatcccgcagtcgcataactcgagtgagttcaagcagcatcaaagcagcatacacaacatcaacttgttttaaagtggtcaagaccaataagacctattgtctcagcattgctgaaatatctaatactctcttcggagaattcagaatcgtcccgttactagttgagatcctcaaagatgacggggttagagaagccaggtctggctagttgagtcaactatgaaagagttggaaagatggcattgtatcacctatcttctgcgacatcaagaatcaaaccgaatgccggcgcgtgctcgaattccatgtcgccagttgaccacaatcagccagtgctcatgcgatcagattaagccttgtcaatagtctcttgattaagaaaaaatgtaagtggcaatgagatacaaggcaaaacagctcatggtaaataatacgggtaggacatggcgagctccggtcctgaaagggcagagcatcagattatcctaccagagtcacacctgtcttcaccattggtcaagcacaaactactctattattggaaattaactgggctaccgcttcctgatgaatgtgacttcgaccacctcattctcagccgacaatggaaaaaaatacttgaatcggcctctcctgatactgagagaatgataaaactcggaagggcagtacaccaaactcttaaccacaattccagaataaccggagtactccaccccaggtgtttagaagaactggctaatattgaggtccctgattcaaccaacaaatttcggaagattgagaagaagatccaaattcacaacacgagatatggagaactgttcacaaggctgtgtacgcatatagagaagaaactgctggggtcatcttggtctaacaatgtcccccggtcagaggagttcagcagcattcgtacggatccggcattctggtttcactcaaaatggtccacagccaagtttgcatggctccatataaaacagatccagaggcatctgattgtggcagctaggacaaggtctgcggccaacaaattggtgatgctaacccataaggtaggccaagtctttgtcactcctgaacttgttgttgtgacgcatacgaatgagaacaagttcacatgtcttacccaggaacttgtattgatgtatgcagatatgatggagggcagagatatggtcaacataatatcaaccacggcggtgcatctcagaagcttatcagagaaaattgatgacattttgcggttaatagacgctctggcaaaagacttgggtaatcaagtctacgatgttgtatcactaatggagggatttgcatacggagctgtccagctactcgagccgtcaggtacatttgcgggagatttcttcgcattcaacctgcaggagcttaaagacattctaattggcctcctccccaatgatatagcagaatccgtgactcatgcaatcgctactgtattctctggtttagaacagaatcaagcagctgagatgttgtgcctgttgcgtctgtggggtcacccactgcttgagtcccgtattgcagcaaaggcagtcaggagccaaatgtgcgcaccgaaaatggtagactttgatatgatccttcaggtactgtctttcttcaagggaacaatcatcaacggatacagaaagaagaatgcaggtgtgtggccgcgagtcaaagtggatacaatatatgggaaggtcattgggcaactacatgcagattcagcagagatttcacacgatatcatgttgagagagtataagagtttatctgcacttgaatttgagccatgtatagaatacgaccctgtcactaacctgagcatgttcctaaaagacaaggcaatcgcacaccccaacgataattggcttgcctcgtttaggcggaaccttctctccgaagaccagaagaaacatgtaaaggaagcgacttcgactaaccgcctcttgatagagtttttagagtcaaatgattttgatccatataaagagatggaatatctgacgacccttgagtaccttagagatgacaatgtggcagtatcatactcgctcaaagagaaggaagtgaaagttaatggacggatcttcgctaagctgacaaagaagttaaggaactgtcaggtgatggcggaagggatcctagccgatcagattgcacctttctttcagggaaatggagtcattcaggatagcatatccttgaccaagagtatgctagcgatgagtcaactgtcttttaacagcaataagaaacgtatcactgactgtaaagaaagagtatcttcaaaccgcaatcatgatccgaaaagcaagaaccgtcggagagttgcaaccttcataacaactgacctgcaaaagtactgtcttaattggagatatcagacgatcaaattgttcgctcatgccatcaatcagttgatgggcctacctcatttcttcgagtggattcacctaagactgatggacactacgatgttcgtaggagaccctttcaatcctccaagtgaccctactgactgtgacctctcaagagtccctaatgatgacatatatattgtcagtgccagagggggtatcgaaggattatgccagaagctatggacaatgatctcaattgctgcaatccaacttgctgcagctagatcgcattgtcgtgttgcctgtatggtacagggtgataatcaagtaatagcagtaacgagagaggtaagatcagatgactctccggagatggtgttgacacagttgcatcaagccagtgataatttcttcaaggaattaatccatgtcaatcatttgattggccataatttgaaggatcgtgaaaccatcaggtcagacacattcttcatatacagcaaacgaatcttcaaagatggagcaatcctcagtcaagtcctcaaaaattcatctaaattagtgctagtgtcaggtgatctcagtgaaaacaccgtaatgtcctgtgccaacattgcctctactgtagcacggctatgcgagaacgggcttcccaaagacttctgttactatttaaactatataatgagttgtgtgcagacatactttgactctgagttctccatcaccaacaattcgcaccccgatcttaatcagtcgtggattgaggacatctcttttgtgcactcatatgttctgactcctgcccaattagggggactgagtaaccttcaatactcaaggctctacactagaaatatcggtgacccggggactactgcttttgcagagatcaagcgactagaagcagtgggactactgagtcctaacattatgactaatatcttaactaggccgcctgggaatggagattgggccagtctgtgcaacgacccatactctttcaattttgagactgttgcaagcccaaatattgttcttaagaaacatacgcaaagagtcctatttgaaacttgttcaaatcccttattgtctggagtgcacacagaggataatgaggcagaagagaaggcattggctgaattcttgcttaatcaagaggtgattcatccccgcgttgcgcatgccatcatggaggcaagctctgtaggtaggagaaagcaaattcaagggcttgttgacacaacaaacactgtaattaagattgcgcttactaggaggccattaggcatcaagaggctgatgcggatagtcaattattctagcatgcatgcaatgctgtttagagacgatgttttttcctctagtagatccaaccaccccttagtctcttctaatatgtgttctctgacactggcagactatgcacggaatagaagctggtcacctttgacgggaggcaggaaaatactgggtgtatctaatcctgatacgatagaactcgtagagggtgagattcttagtgtaagcggagggtgtacaagatgtgacagcggagatgaacaatttacttggttccatcttccaagcaatatagaattgaccgatgacaccagcaagaatcctccgatgagggtaccatatctcgggtcaaagacacaggagaggagagctgcctcacttgcgaaaatagctcatatgtcgccacatgtgaaggctgccctaagggcatcatccgtgttgatctgggcttatggggataatgaagtaaattggactgctgctctcacgattgcaaaatctcggtgtaatgtaaacttagagtatcttcggttactgtcccctttacccacggctgggaatcttcaacatagactagatgatggtataactcagatgacattcacccctgcatctctctacaggtgtcaccttacattcacatatccaatgattctcaaaggctgttcactgaagaaggagtcaaagaggggaatgtggtttaccaacagagtcatgctcttgggtttatctctaatcgaatcgatctttccaatgacaacaaccagaacatatgatgagatcacactgcacctacatagtaaatttagttgctgtatcagggaagcacctgttgcggttcctttcgagctacttggggtggcaccggaactgaggacagtgacctcaaataagtttatgtatgatcctagccctgtatcggagggagactttgcgagacttgacttagctatcttcaagagttatgagcttaatctggagtcatatcccacgatagagctaatgaacattctttcaatatccagcgggaagttgattggccagtctgtggtttcttatgatgaagatacctccataaagaatgatgccataatagtgtatgacaatacccgaaattggatcagtgaagctcagaattcagatgtggtccgcctatttgaatatgcagcacttgaagtgctcctccaccgttcttaccaactctattacctgagagtaagaggcctagacaatattgtcttatatatgggtgatttatacaagaatatgccaggaattctactttccaacattgcagctacaatatctcatcctgtcattcattcaaggttacatgcagtgggcctggtcaaccatgacggatcacaccaacttgcagatacggattttatcgaaatgtctgcaaaactgttagtatcttgcacccgacgtgtgatctccggcttatattcaggaaataagtatgatctgctgttcccatctgtcttagatgataacctgaatgagaagatgcttcagctgatatcccggttatgctgtctgtacacggtactctttgctacaacaagagaaatcccgaaaataagaggcttaactgcagaagagaaatgttcaatactcactgagtatttactgtcggatgctgtgaaaccattacttagccccgatcaagtgagctctatcatgtctcctaacataattacattcccagctaatctgtactacatgtctcggaagagcctcaatttgatcagggaaagggaggacagggatactatcctggcgttgttgttcccccaagagccattattagagttcccttctgtgcaagatattggtgctcgagtgaaagatccattcacccgacaacctgcggcatttttgcaagagttagatttgagtgctccagcaaggtatgacgcattcacacttagtcagattcatcctgaactcacatctccaaatccggaggaagactacttagtacgatacttgttcagagggatagggactgcatcttcctcttggtataaggcatcccatctcctttctgtacccgaggtaagatgtgcaagacacgggaactccttatacttggctgaaggaagcggagccatcatgagtcttcttgaactgcatgtaccacatgaaactatctattacaatacgctcttttcaaatgagatgaaccccccgcaacgacatttcgggccgaccccaactcagtttttgaattcggttgtttataggaatctacaggcggaggtaacatgcaaggatggatttgtccaagagttccgtccattatggagagaaaatacagaggaaagtgacctgacctcagataaagcagtggggtatattacatctgcagtaccctacagatctgtatcattgctgcattgtgacattgaaattcctccagggtccaatcaaagcttactagatcaactagctatcaatttatctctgattgccatgcattctgtaagggagggcggggtagtaatcatcaaagtgttgtatgcaatgggatactactttcatctactcatgaacttgtttgctccgtgttccacaaaaggatatattctctctaatggttatgcatgtcgaggggatatggagtgttacctggtatttgtcatgggttacctgggcgggcctacatttgtacatgaggtggtgaggatggcaaaaactctggtgcagcggcacggtacgctcttgtctaaatcagatgagatcacactgaccaggttattcacctcacagcggcagcgtgtgacagacatcctatccagtcctttaccaagattaataaagtacttgaggaagaatattgacactgcgctgattgaagccgggggacagcccgtccgtccattttgtgcggaaagtttggtgagcacgctagcgaacataactcagataacccagattatcgctagtcacattgacacagtcatccggtctgtgatatatatggaagctgagggtgatctcgctgacacagtatttctatttaccccttacaatctctctactgacgggaaaaagaggacatcacttaaacagtgcacgagacagatcctagaggttacaatactaggtcttagagtcgaaaatctcaataaaataggcgatataatcagcctagtgcttaaaggcatgatctccatggaggaccttatcccactaaggacatacttgaagcatagtacctgccctaaatatttgaaggctgtcctaggtattaccaaactcaaagaaatgtttacagacacttctgtactgtacttgactcgtgctcaacaaaaattctacatgaaaactataggcaatgcagtcaaaggatattacagtaactgtgactcctaacgaaaatcacatattaataggctccttttttggccaattgtattcttgttgatttaattatattatgttagaaaaaagttgaactctgactccttaggactcgaattcgaactcaaataaatgtctttaaaaaaggttgcgcacaattattcttgagtgtagtctcgtcattcaccaaatctttgtttggt

SEQ ID NO: 29 - protein, 617 aa, Measles virus
MSPQRDRINAFYKDNPHPKGSRIVINREHLMIDRPYVLLAVLFVMFLSLIGLLAIAGIRLHRAAIYTAEIHKSLSTNLDVTNSIEHQVKDVLTPLFKIIGDEVGLRTPQRFTDLVKFISDKIKFLNPDREYDFRDLTWCINPPERIKLDYDQYCADVAAEELMNALVNSTLLEARATNQFLAVSKGNCSGPTTIRGQFSNMSLSLLDLYLSRGYNVSSIVTMTSQGMYGGTYLVEKPNLSSKGSELSQLSMHRVFEVGVIRNPGLGAPVFHMTNYFEQPVSNDFSNCMVALGELKFAALCHREDAITIPYQGSGKGVSFQLVKLGVWKSPTDMQSWVPLSTDDPVIDRLYLSSHRGVIADNQAKWAVPTTRTDDKLRMETCFQQACKGKIQALCENPEWAPLKDNRIPSYGVLSVNLSLTVELKIKIASGFGPLITHGSGMDLYKSNHNNVYWLTIPPMKNLALGVINTLEWVPRFKVSPNLFTVPIKEAGEDCHAPTYLPAEVDGDVKLSSNLVILPGQDLQYVLATYDTSRVEHAVVYYVYSPSRSFSYFYPFRLPIKGFPIELQVECFTWDQKLWCRHFCVLADSESGGHITHSGMVGMGVSCTVTREDGTNRR

SEQ ID NO: 30 - DNA, 1854 bp, Measles virus
atgtcaccacaacgagaccggataaatgccttctacaaagacaacccccatcctaagggaagtaggatagttattaacagagaacatcttatgattgatagaccttatgttttgctggctgttctgttcgtcatgtttctgagcttgatcgggctgctagccattgcaggcattagactgcatcgggcagccatctacaccgcagagatccataaaagcctcagcaccaatctagatgtaactaactcaatcgagcatcaggtcaaggacgtgctgacaccactcttcaagatcattggtgatgaagtgggcctgaggacacctcagagattcactgatctagtgaaattcatctctgacaagattaaattccttaatccggatagggagtacgacttcagagatctcacttggtgtatcaacccgccagagagaatcaaattggattatgaccaatactgtgcagatgtggctgctgaagaactcatgaatgcattggtgaactcaactctactggaagccagggcaaccaatcagttcctagctgtctcaaagggaaactgctcagggcccactacaatcagaggtcaattctcaaacatgtcgctgtccctgttggacttgtatttaagtcgaggttacaatgtgtcatctatagtcactatgacatcccagggaatgtacgggggaacttacctagtggaaaagcctaatctgagcagcaaaggttcggagttgtcacaactgagcatgcaccgagtgtttgaagtaggtgttatcagaaatccgggtttgggggctccggtgttccatatgacaaactattttgagcaaccagtcagtaatgatttcagcaactgcatggtggctttaggagagctcaaattcgcagccctttgtcacagggaggatgctatcacaattccctatcagggatcagggaaaggtgtcagcttccagctcgtcaagctaggtgtctggaaatccccaaccgacatgcaatcctgggtccccctatcaacggatgatccagtgatagacaggctttacctctcatctcacagaggcgttatcgctgacaatcaagcaaaatgggctgtcccgacaacacggacagatgacaagttgcgaatggagacatgcttccagcaggcgtgtaagggtaaaatccaagcactctgcgagaatcccgagtgggcaccattgaaggataacaggattccttcatacggggtcttgtctgttaatctgagtctgacagttgagcttaaaatcaaaattgcttcaggattcgggccattgatcacacacggttcagggatggacctgtacaaatccaaccacaacaatgtgtattggctgactatcccgccaatgaagaacctagccttaggtgtaatcaacacattggagtgggtaccgagattcaaggttagtcccaacctcttcactgttccaatcaaggaagcaggcgaggactgccatgccccaacatacctacctgcggaggtggatggtgatgtcaaactcagttccaatctggtgattctacctggtcaagacctccaatatgttttggcaacctacgatacttccagagttgagcatgctgtggtttattacgtttacagcccaagccgctcattttcttacttttatccttttaggttgcctataaaggggttccccatcgaattacaggtggaatgcttcacttgggaccaaaaactctggtgccgtcacttctgtgtgcttgcggactcagaatctggtggacatatcactcactctgggatggtgggcatgggagttagctgtacagtcactcgagaagatggaaccaaccgcagatag

SEQ ID NO: 31 - protein, 617 aa, Measles virus
MSPQRDRINAFYKDNPHPKGSRIVINREHLMIDRPYVLLAVLFVMFLSLIGLLAIAGIRLHRAAIYTAEIHKSLSTNLDVTNSIEHQVKDVLTPLFKIIGDEVGLRTPQRFTDLVKFISDKIKFLNPDREYDFRDLTWCINPPERIKLDYDQYCADVAAEELMNALVNSTLLEARATNQFLAVSKGNCSGPTTIRGQFSNMSLSLLDLYLSRGYNVSSIVTMTSQGMYGGTYLVEKPNLSSKGSELSQLSMHRVFEVGVIRNPGLGAPVFHMTNYFEQPVSNDFSNCMVALGELKFAALCHREDSITIPYQGSGKGVSFQLVKLGVWKSPTDMQSWVPLSTDDPVIDRLYLSSHRGVIADNQAKWAVPTTRTDDKLRMETCFQQACKGKIQALCENPEWAPLKDNRIPSYGVLSVNLSLTVELKIKIASGFGPLITHGSGMDLYKSNHNNVYWLTIPPMKNLALGVINTLEWVPRLKVSPNLFTVPIKEAGEDCHAPTYLPAEVDGDVKLSSNLVILPGQDLQYVLATYDTSRVEHAVVYYVYSPSRSFSYFYPFRLPIKGVPIELQVECFTWDQKLWCRHFCVLADSETGGHITHSGMVGMGVSCTVTREDGTNRR

SEQ ID NO: 32 - DNA, 1854 bp, Measles virus
atgtcaccacaacgagaccggataaatgccttctacaaagacaacccccatcctaagggaagtaggatagttattaatagagaacatcttatgattgatagaccttatgttttgctggctgttctattcgtcatgtttctgagcttgatcgggctgctagccattgcaggcattagactgcatcgggcagctatctacaccgcagagatccataaaagcctcagcaccaatctagatgtaactaactcaatcgagcatcaggtcaaggacgtgctgacaccactcttcaagatcatcggtgatgaagtgggcctgaggacacctcagagattcactgacctagtgaaattcatctctgacaagattaaattccttaatccggatagggagtacgacttcagagatctcacttggtgtatcaacccgccagagagaatcaaattggattatgaccaatactgtgcagatgtggctgctgaagaactcatgaatgcattggtgaactcaactctactggaggccagggcaaccaatcagttcttagctgtctcaaagggaaactgctcagggcccactacaatcagaggtcaattctcaaacatgtcgctgtccctgttggacttgtatttaagtcgaggttacaatgtgtcatctatagtcactatgacatcccagggaatgtacgggggaacttacctagtggaaaagcctaatctgagcagcaaagggtcagagttgtcacaactgagcatgcaccgggtgtttgaggtaggtgttatcagaaatccgggtttgggggctccagtgttccatatgacaaactattttgagcaaccagtcagtaatgatttcagcaactgcatggtggctttaggggagctcaaattcgcagccctttgtcacagggaggattctatcacaattccctatcaagggtcagggaaaggtgtcagcttccagctcgtcaagctaggtgtctggaaatccccaaccgacatgcaatcctgggtccccctatcaacggatgatccagtgatagacaggctttacctctcatctcacagaggcgttatcgctgacaatcaagcaaaatgggctgtcccgacaacacggacagatgacaagttgcgaatggagacatgcttccagcaggcgtgtaagggtaaaatccaagcactctgcgagaatcccgagtgggcaccattgaaggataacaggattccttcatacggggtcttgtctgttaatctgagtctgacagttgagcttaaaatcaaaattgcttcaggattcgggccattgatcacacacggttcagggatggacctgtacaagtccaaccacaacaatgtgtattggctgactatcccgccaatgaagaacctagccttaggtgtaatcaacacattggaatgggtaccgagactcaaggttagtcccaacctcttcactgttccaatcaaggaggcaggcgaggactgccatgccccgacatacctacctgcggaggtggatggtgatgtcaaactcagttccaatctggtgattctacctggtcaagacctccaatatgttttggcaacctacgatacttctagagttgaacatgctgtggtttattacgtttacagcccaagccgctcattttcttacttttatccttttaggttgcctataaagggggtccccatcgaattacaagtggaatgcttcacatgggaccaaaaactctggtgccgtcacttctgtgtgcttgcggactcagaaactggtggacatatcactcactctgggatggtgggcatgggagtcagctgcacagtcactcgggaagatggaaccaaccgcagatag

SEQ ID NO: 33 - protein, 617 aa, Measles virus
MSLQRDRINAFYKDNPHSKGSRIVINREHLMIDRPYVLLAVLFVMFLSLIGLLAIAGIRLHRAAIYTAEIHKSLSTNLDVTNSIEHQVKDVLTPLFKIIGDEVGLRTPQRFTDLVKFISDKIKFLNPDREYDFRDLTWCINPPERIKLNYDQYCADVAAEELMNALVNSTLLETRTTNQFLAVSKGNCSGPTTIRGQFSNMSLSLLDLYLSRGYNVSSIVTMTSQGMYGGTYLVEKPNLNSKGSELSQLSMYRVFEVGVIRNPGLGAPVFHMTNYFEQPISKDLSNCMVALGELKLAALCHGGDSITIPYQGSGKGVSFQLVKLGVWKSPTDMQSWVPLSTDDPVIDRLYLSSHRGVITDNQANWAVPTTRTDDKLRMETCFQQACKGKIQALCENPEWAPLKDSRIPSYGVLSVDLSLAAEPKIKIASGFGPLITHGSGMDLYKSNHNNVYWLTIPPMKNLALGVINTLEWIPRLKVSPNLFTVPIKEAGENCHAPTYLPAEVDGDVKLSSNLVILPGQDLQYVLATYDTSRVEHAVVYYVYSPSRSFSYFYPFRLPIKGTPIELQVECFTWDQRLWCRHFCVLADSESGGHITHSGMVGMGVSCTVNREDEANRR

SEQ ID NO: 34 - DNA, 1854 bp, Measles virus
atgtcactgcaacgagaccggataaatgccttctacaaagataaccctcattccaaaggaagtaggatagttattaacagagaacatctcatgattgatagaccttatgttttgctggctgttctgttcgtcatgtttctgagcttgatcgggttgctggccattgcaggcattaggcttcatcgggcagctatctacactgcagagatccataaaagcctcagcaccaatctagatgtaactaactcaatcgagcatcaggtcaaggatgtgctgacaccgctcttcaaaatcatcggtgatgaagtgggcctgagaacacctcagagattcactgacctagtgaaattcatctctgacaagatcaaattccttaatccggatagggagtatgacttcagagatctcacttggtgtatcaacccgccagagagaatcaaattgaattatgatcaatactgtgcagatgtggctgctgaagagctcatgaatgcattagtgaactcaactctactggagaccagaacaaccaatcagttcctagctgtctcaaagggaaactgctcagggcccactaccatcagaggtcaattctcaaacatgtcgctgtctctgttagacttatatttaagtcgaggttacaatgtgtcatctatagtcactatgacgtcccagggaatgtatgggggaacttacctagttgaaaagcccaatctgaacagcaaaggatcagaattatcacaactgagcatgtaccgagtgtttgaagtaggtgttataagaaatccaggcttgggggctccggtgttccatatgacaaactattttgaacaaccaatcagcaaggatctcagcaactgcatggtagctttgggggagctcaaactcgcagccctttgtcacgggggagattccatcacaattccctatcagggatcagggaaaggtgtcagcttccaactcgtcaagctaggtgtctggaaatccccaaccgacatgcaatcctgggtccccctatcaacggatgacccagtgatagacaggctctacctctcatctcacagaggtgtcatcactgacaatcaagcaaattgggctgttccgacaacacgaacagatgataagttgcggatggagacatgcttccagcaggcgtgcaagggcaaaatccaagcactctgtgaaaatcccgagtgggcaccgttgaaggacagcaggattccttcatacggggtcttgtctgtcgacctgagtctggcagctgagcccaaaatcaaaattgcttcgggattcggtccattgatcactcacggttcagggatggacctatacaaatccaaccacaacaatgtgtattggctgactatcccgccaatgaagaacttagccttaggtgtaatcaacacattggagtggataccgagactcaaggttagtcccaacctcttcactgtcccaattaaggaagctggcgagaactgccatgccccaacatacctacctgcggaggtggatggtgatgtcaaactcagttccaatctggtgattttacctggtcaagatctccaatatgttttggcaacctacgatacttccagagttgaacatgctgtggtttattacgtttacagcccaagccgctcattctcttacttttatccctttaggttacctataaaggggacccccatcgaattacaagtggaatgcttcacatgggaccaaagactctggtgccgtcacttctgtgtgcttgctgactcggaatctggtggacatatcacccactctgggatggtgggcatgggagtcagctgcacagtcaaccgggaagacgaagccaatcgcagatag

SEQ ID NO: 35 - protein, 550 aa, Measles virus
MGLKVNVSAIFMAVLLTLQTPTGQIHWGNLSKIGVVGIGSASYKVMTRSSHQSLVIKLMPNITLLNNCTRVEIAEYRRLLRTVLEPIRDALNAMTQNIRPFQSVASSRRHKRFAGVVLAGAALGVATAAQITAGIALHQSMLNSQAIDNLRASLETTNQAIEAIRQAGQEMILAVQGVQDYINNELIPSMNQLSCDLIGQKLGLKLLRYYTEILSLFGPSLRDPISAEISIQALSYALGGDINKVLEKLGYSGGDLLGILESRGIKARITHVDTESYFIVLSIAYPTLSEIKGVIVHRLEGVSYNIGSQEWYTTVPKYVATQGYLISNFDESSCTFMPEGTVCSQNALYPMSPLLQECLRGSTKSCARTLVSGSFGNRFILSQGNLIANCASILCKCYTTGTIINQDPDKILTYIAADHCPVVEVNGVTIQVGSRRYPDAVYLHRIDLGPPISLERLDVGTNLGNAIAKLEDAKELLESSDQILRSMKGLSSTSIVYILIAVCLGGLIGIPALICCCRGRCNKKGEQVGMSRPGLKPDLTGTSKSYVRSL

SEQ ID NO: 36 - DNA, 2383 bp, Measles virus
cttagggtcaaggaacatacacacccaacagaacccagaccccgacccacggcgccgcgcccccaacccccgacaaccagagggagcccccaaccaatcccgccggctccctcggtgcccacagacaggcacaccaacccccgaacaggcccagtgcccagccatcgacaatctaagacgggggggccccccccaaaaaaagcccccaggggccgacagccagcaccgcgcggaagcccacccaccccacacacgaccacgacaaccaaaccagaatccagaccaccctgggccgccagctcccagactcggccatcaccccgcagaaaggaaagggcacaacccgcgcaccccagccccgatccggcgggcagccacccaacccgaaccggcacccaagagcgatccccgaaggacccccgagccgcaaaggacatcagtatcccacagcctctccaagtcccctggtctcttcctcttctcgaagggaccaaaagatcaatccaccacatccgacgacactcaactccccacccctaaaggagacaccgggagtcctggaatcaagactcatccaatgtccatcatgggtctcaaggtgaacgtctctgccatattcatggcagtactgttaactctccaaacacccaccggtcaaatccattggggcaatctctctaagataggggtggtaggaataggaagtgcaagctacaaagttatgactcgttccagccatcaatcattagtcataaaattaatgcccaatataactctcctcaataactgcacgagggtagagattgcagaatacaggagactactgagaacagttttggaaccaattagagatgcacttaatgcaatgacccagaatataagaccgtttcagagtgtagcttcaagtaggagacacaagagatttgcgggagtagtcctggcaggtgcggccctaggcgttgccacagctgctcagataacagccggcattgcacttcaccagtccatgctgaactctcaagccatcgacaatctgagagcaagtctggaaactactaatcaggcaattgaggcaatcagacaagcagggcaggagatgatattggctgttcagggtgtccaagactacatcaataatgagctgataccgtctatgaaccaactatcttgtgatttaatcggccagaagctcgggctcaaattgctcagatactatacagaaatcctgtcattatttggccctagcttacgggaccccatatctgcggagatatctatccaggctttgagctatgcgctcggaggagatatcaataaggtgttagaaaagctcggatatagcggaggtgatttactgggcatcttagagagcagaggaataaaggcccggataactcacgtcgacacagagtcctacttcattgtcctcagtatagcttatccgacgctgtccgagatcaagggggtgattgtccaccggctcgagggggtctcgtacaacataggctctcaagagtggtatacgactgtgcccaagtatgttgcaacccaagggtaccttatctcgaattttgatgagtcatcgtgtacttttatgccagaggggactgtgtgcagccaaaatgccttgtacccgatgagtcctctgctccaagaatgcctccgggggtccaccaagtcctgtgctcgtacactcgtatctgggtcttttgggaaccggtttattttgtcacaagggaacctaatagccaattgtgcatcgatcctttgcaagtgttacacaacaggaacgatcattaatcaagaccctgacaagatcctaacatacattgctgcagatcactgcccggtagtcgaagtgaacggcgtgaccatccaagtcgggagcaggaggtatccagacgctgtgtacttgcacagaattgacctcggtcctcccatatcattggagaggttggacgtagggacaaatctggggaatgcaattgctaagttggaggatgccaaagaattgttggagtcatcggaccagatattgaggagtatgaaaggtttgtcgagcactagcatagtctacatcctgattgcagtgtgtcttggagggttgatagggatccccgctttaatatgttgctgcagggggcgttgtaacaaaaagggagaacaagttggtatgtcaagaccaggcctaaagcctgatcttacaggaacatcaaaatcctatgtaaggtcgctctgatcctctacaactcttggaacacaaatgtcccacaagtctcctcttcgtcatcaagcaaccaccgcatccagcatcaagcccacctgaaattatctccggcttccctttggccgaacaatatcggcagttaattaaaacttaggg

SEQ ID NO: 37 - protein, 553 aa, Measles virus
MSIMGLKVNVSAIFMAVLLTLQTPTGQIHWGNLSKIGVVGIGSASYKVMTRSSHQSLVIKLMPNITLLNNCTRVEIAEYRRLLRTVLEPIRDALNAMTQNIRPVQSVASSRRHKRFAGVVLAGAALGVATAAQITAGIALHQSMLNSQAIDNLRASLETTNQAIEAIRQAGQEMILAVQGVQDYINNELIPSMNQLSCDLIGQKLGLKLLRYYTEILSLFGPSLRDPISAEISIQALSYALGGDINKVLEKLGYSGGDLLGILESRGIKARITHVDTESYFIVLSIAYPTLSEIKGVIVHRLEGVSYNIGSQEWYTTVPKYVATQGYLISNFDESSCTFMPEGTVCSQNALYPMSPLLQECLRGSTKSCARTLVSGSFGNRFILSQGNLIANCASILCKCYTTGTIINQDPDKILTYIAADHCPVVEVNGVTIQVGSRRYPDAVYLHRIDLGPPISLERLDVGTNLGNAIAKLEDAKELLESSDQILRSMKGLSSTSIVYILIAVCLGGLIGIPALICCCRGRCNKKGEQVGMSRPGLKPDLTGTSKSYVRSL

SEQ ID NO: 38 - DNA, 2384 bp, Measles virus
tcgagggccaaggaacatacacacccaacagaacccagaccccggcccacggcgccgcgcccccaacccccgacaaccagagggagcccccaaccaatccgccggctcccccggtgcccacaggcagggacaccaacccccgaacagacccagcacccaaccatcgacaatccaagacgggggggcccccccaaaaaaaaggcccccaggggccgacagccagcaccgcgaggaagcccacccaccccacacacgaccacggcaaccaaaccagaacccagaccaccctgggtcaccagctccagacctcggtcatcaccccgcagaaaggaaaggcacaacccgcgaccccagccccgatccggcggggagccacccaacccgaaccagcacccaagagcgatccccgaaggacccccgaaccgcaaaggacatcagtatcccacagcctctccaagtcccccggtctcctcctcttctcgaagggaccaaaagatcaatccaccaccacacacccgacgacactcaactccccacccctaaaggagacaccgggaatcccagaatcaagactcatccaatgtccatcatgggtctcaaggtgaacgtctctgccatattcatggcagtactgttaactctccaaacacccaccggtcaaatccattggggcaatctctctaagataggggtggtaggaataggaagtgcaagctacaaagttatgactcgttccagccatcaatcattagtcataaaattaatgcccaatataactctcctcaataactgcacgagggtagagattgcagaatacaggagactactgagaacagttttggaaccaattagagatgcacttaatgcaatgacccagaatataagaccggttcagagtgtagcttcaagtaggagacacaagagatttgcgggagtagtcctggcaggtgcggccctaggcgttgccacagctgctcagataacagccggcattgcacttcaccagtccatgctgaactctcaagccatcgacaatctgagagcgagcctggaaactactaatcaggcaattgaggcaatcagacaagcagggcaggagatgatattggctgttcagggtgtccaagactacatcaataatgagctgataccgtctatgaaccaactatcttgtgatttaatcggccagaagctcgggctcaaattgctcagatactatacagaaatcctgtcattatttggccccagcttacgggaccccatatctgcggagatatctatccaggctttgagctatgcgcttggaggagacatcaataaggtgttagaaaagctcggatacagtggaggtgatttactgggcatcttagagagcagaggaataaaggcccggataactcacgtcgacacagagtcctacttcattgtcctcagtatagcctatccgacgctgtccgagattaagggggtgattgtccaccggctagagggggtctcgtacaacataggctctcaagagtggtataccactgtgcccaagtatgttgcaacccaagggtaccttatctcgaattttgatgagtcatcgtgtactttcatgccagaggggactgtgtgcagccaaaatgccttgtacccgatgagtcctctgctccaagaatgcctccgggggtccaccaagtcctgtgctcgtacactcgtatccgggtcttttgggaaccggttcattttatcacaagggaacctaatagccaattgtgcatcaatcctttgcaagtgttacacaacaggaacgatcattaatcaagaccctgacaagatcctaacatacattgctgccgatcactgcccggtagtcgaggtgaacggcgtgaccatccaagtcgggagcaggaggtatccagacgctgtgtacttgcacagaattgacctcggtcctcccatatcattggagaggttggacgtagggacaaatctggggaatgcaattgctaagttggaggatgccaaggaattgttggagtcatcggaccagatattgaggagtatgaaaggtttatcgagcactagcatagtctacatcctgattgcagtgtgtcttggagggttgatagggatccccgctttaatatgttgctgcagggggcgttgtaacaaaaagggagaacaagttggtatgtcaagaccaggcctaaagcctgatcttacgggaacatcaaaatcctatgtaaggtcgctctgatcctctacaactcttgaaacacaaatgttcccacaagtctcctcttcgtcatcaagcaaccaccgcacccagcatcaagcccacctgaaccagctaaattatctccggcttccctctggccgaacaatatcggtagttaatt

SEQ ID NO: 39 - protein, 553 aa, Measles virus
MSIMGLKVNVSAIFMAVLLTLQTPAGQIHWGNLSKIGVVGIGSASYKVMTRSSHQSLVIKLIPNITLLNNCTKVEIAEYRRLLRTVLEPIRDALNAMTQNIRPVQSVASSMRHKRFAGVVLAGAALGVATAAQITAGIALHRSMLNSQAIDNLRASLETTNQAIEAIRQAGQEMILAVQGVQDYINNELIPSMNQLSCDLIGQKLGLKLLRYYTEILSLFGPSLRDPISAEISIQALSYALGGDINKVLEKLGYSGGDLLGILESRGIKARITHVDTESYFIVLSIAYPTLSEIKGVIVHRLEGVSYNIGSQEWYTTVPKYVATQGYLISNFDESSCTFMPEGTVCSQNALYPMSPLLQECLRGSTKSCARTLVSGSFGNRFILSQGNLIANCASILCKCYTTGTIINQDPDKILTYIAADRCPVVEVNGVTIQVGSRRYPDAVYLHRIDLGPPISLERLDVGTNLGNAIAKLEDAKELLESSDQILRSMKGLSSTSIVYILIAVCLGGLIGIPTLICCCRGRCNKKGEQVGMSRPGLKPDLTGTSKSYVRSL

SEQ ID NO: 40 - DNA, 1662 bp, Measles virus
atgtccatcatgggtctcaaggtgaacgtctctgccatattcatggcagtactgttaactctccaaacacccgccggtcaaatccattggggcaatctctctaagataggggtagtaggaataggaagtgcaagctacaaagttatgactcgttccagccatcaatcattagtcataaaattaattcccaatataactctcctcaataactgcacgaaggtagagattgcagagtacaggagactactaagaacagttttggaaccaattagagatgcacttaatgcaatgacccagaacataaggccggttcagagcgtagcttcaagtatgagacacaagagatttgcgggagtagtcctggcaggtgcggccctaggcgttgccacagctgctcagataacagccggcattgcacttcaccggtccatgctgaactctcaagccatcgacaatctgagagcgagcctggaaactactaatcaggcaattgaggcaatcagacaagcagggcaggagatgatcttggctgttcagggggtccaagactacatcaataatgagctgataccatctatgaaccagctatcttgtgatttaatcgggcagaagctcgggctcaaattgctcagatactatacagaaatcctgtcattatttggccccagcctacgagaccccatatctgcggagatatctatccaggccttgagctatgcacttggaggagatatcaataaggtgttagaaaagctcggatacagtggaggcgatttactgggcatcttagagagcagaggaataaaggctcggataactcacgtcgacacagagtcctacttcattgtcctcagtatagcctatccgacactgtccgagattaagggggtgattgtccatcggctagagggggtctcgtacaacataggctctcaagagtggtataccactgtgcccaagtatgttgcaacccaagggtaccttatctcgaattttgatgagtcatcgtgtaccttcatgccagaggggactgtgtgcagccaaaatgccttgtacccgatgagtcctctgctccaagaatgcctccgggggtccaccaagtcctgtgctcgtacactcgtatccgggtcttttgggaaccggttcattttatcacaagggaacctaatagccaattgtgcatcaattctttgcaagtgttacacaacaggaacgatcattaatcaagaccctgacaagattctaacatacatcgctgccgatcgctgcccggtagtcgaggtaaacggcgtgaccatccaagtcgggagcaggaggtatccagacgctgtgtatttgcacagaattgacctcggtcctcccatatcattggagaggttggacgtagggacaaatctggggaatgcaattgccaaattggaggatgccaaggaattgttggagtcatcggaccagatattgaggagtatgaaaggtttatcgagcactagcatagtctacatcctgattgcagtgtgtcttggagggctgatagggatccccactttaatatgttgctgcagggggcgttgtaacaaaaagggagaacaagttggtatgtcaagaccaggcctaaagcctgatcttacaggaacatcaaaatcatatgtaaggtcgctctga

SEQ ID NO: 41 - protein, 525 aa, Measles virus
MATLLRSLALFKRNKDKPPITSGSGGAIRGIKHIIIVPIPGDSSITTRSRLLDRLVRLIGNPDVSGPKLTGALIGILSLFVESPGQLIQRITDDPDVSIRLLEVVQSDQSQSGLTFASRGTNMEDEADQYFSHDDPSSSDQSRFGWFENKEISDIEVQDPEGFNMILGTILAQIWVLLAKAVTAPDTAADSELRRWIKYTQQRRVVGEFRLERKWLDVVRNRIAEDLSLRRFMVALILDIKRTPGNKPRIAEMICDIDTYIVEAGLASFILTIKFGIETMYPALGLHEFAGELSTLESLMNLYQQMGETAPYMVILENSIQNKFSAGSYPLLWSYAMGVGVELENSMGGLNFGRSYFDPAYFRLGQEMVRRSAGKVSSTLASELGITAEDARLVSEIAMHTTEDRISRAVGPRQSQVSFLHGDQNENELPRWGGKEDMRVKQSRGEARESYRETRPSRASDARATHPPTDTPLDIDTASESSQDPQDSRRSADALLRLQAMAGISEEQGSDTDTPRVYNDRDLLD

SEQ ID NO: 42 - DNA, 1685 bp, Measles virus
aggattcaagatcctattatcagggacaagagcaggattagggatatccgagatggccacacttctaaggagcttagcattgttcaaaagaaacaaggacaaaccacccattacatcaggatccggtggagccatcagaggaatcaaacacattattatagtaccaatcccgggagattcctcaattaccactcgatctagacttctggaccggttggtcaggttaattggaaacccggatgtgagcgggcccaaactaacaggggcactaataggtatattatccttatttgtggagtctccaggtcaattgattcagaggatcaccgatgaccctgacgttagcataaggctgttagaggttgtccagagtgaccagtcacaatctggccttaccttcgcatcaagaggtaccaacatggaggatgaggcggaccaatatttttcacatgatgatccaagtagtagtgatcaatccaggttcggatggttcgagaacaaggaaatctcagatattgaagtgcaagaccctgagggattcaacatgattctgggtaccatcctagctcaaatttgggtcttgctcgcaaaggcggttacggccccagacacggcagctgattcggagctaagaaggtggataaagtacacccaacaaagaagggtagttggtgaatttagattggagagaaaatggttggatgtggtgaggaacaggattgccgaggacctctccttacgccgattcatggtcgctctaatcctggatatcaagagaacacccgggaacaaacccaggattgctgaaatgatatgtgacattgatacatatatcgtagaggcaggattagccagttttatcctgactattaagtttgggatagaaactatgtatcctgctcttggactgcatgaatttgctggtgagttatccacacttgagtccttgatgaatctttaccagcaaatgggggaaactgcaccatacatggtaatcctggagaactcaattcagaacaagttcagtgcaggatcataccctctgctctggagctatgccatgggagtaggagtggaacttgaaaactccatgggaggtttgaactttggccgatcttacttcgatccagcatattttagactagggcaagagatggtgaggaggtcagctggaaaggtcagttccacattggcatctgaactcggtatcactgccgaagatgcaaggcttgtttcagagatcgcaatgcatactacagaggacaggatcagtagagcggttggacccagacaatcccaagtgtcattcctacacggtgatcaaaatgaaaatgagctaccgagatgggggggtaaggaagatatgagggtcaaacagagtcggggagaagccagagagagctacagagaaaccaggcccagcagagcaagtgacgcgagagctacccatcctccaaccgacacacccttagacattgacactgcatcggagtccagccaagatccgcaggacagtcgaaggtcagctgacgccctgctcaggctgcaagccatggcaggaatctcggaagaacaaggctcagacacggacacccctagagtgtacaatgacagagatcttctagactaggtgcaagaggccgaggaccagaacaacatccgcctaccctccatcattgttataa

SEQ ID NO: 43 - protein, 525 aa, Measles virus
MATLLRSLALFKRNKDKPPITSGSGGAIRGIKHIIIVPIPGDSSITTRSRLLDRLVRLIGNPDVSGPKLTGALIGILSLFVESPGQLIQRITDDPDVSIRLLEVVQSDQSQSGLTFASRGTNMEDEADQYFLHDDSSSGDQFRSGWFENKEISDIEVQDPEGFNMILGTILAQIWVLLAKAVTAPDTAADSELRRWIKYTQQRRVVGEFRLERKWLDVVRNRIAEDLSLRRFMVALILDIKRTPGNKPRIAEMICDIDTYIVEAGLASFILTIKFGIETMYPALGLHEFAGELSTLESLMNLYQQMGETAPYMVILENSIQNKFSAGSYPLLWSYAMGVGVELENSMGGLNFGRSYFDPAYFRLGQEMVRRSAGKVSSTLASELGITAEDARLVSEIAMHTTEDRISRAVGPRQAQVSFLHGDQSENELPGLGGKEDKRVKQSRGEARESYRETGHSRANDARAADLPTGTPLDIDTASEFSQDPQDSRRSADALLRLQAMAGIPEEQGSDMDTPRVYNDRDLLD

SEQ ID NO: 44 - DNA, 1578 bp, Measles virus
atggccacgctattaaggagcttagcattgttcaaaagaaacaaggacaaaccacccattacatcaggatccggtggggccatcagagggatcaaacacattattatagtaccaatccctggagactcctcaattaccactcgatccagacttctggaccggttggtcaggctaattggaaacccggatgtgagtgggcctaaattaacaggggcactaataggtatattgtccttatttgtggagtctccaggtcaattgattcagagaatcaccgatgaccctgacgttagcataaggctgttagaggttgtccagagcgaccagtcacaatctggccttacctttgcatcaagaggtaccaacatggaggatgaggcggaccaatactttttacatgatgattcaagtagcggtgatcaattcaggtccggatggttcgagaacaaggaaatctcagatattgaagtgcaggaccctgagggattcaacatgattctgggtaccatcctagctcaaatttgggtcttgctcgcaaaggcggttacggccccagacacggcagctgattcggagctaagaaggtggataaaatacacccaacaaagaagggtagtcggtgaattcagattggagagaaaatggttggatgtagtgaggaacaggattgccgaggacctctccttacgccggttcatggtcgctctaatcctggatatcaagagaacacccgggaacaaacccaggattgctgaaatgatatgtgacattgacacatatatcgtggaggcaggattagccagttttatccttactattaagtttgggatagaaaccatgtatcctgctcttggactgcatgaatttgctggtgagttatcaacacttgagtccttgatgaacctttatcagcaaatgggggaaactgcaccctacatggtcattctggagaactcaattcagaacaagttcagtgcaggatcataccctctgctctggagctatgccatgggagtaggagtggaactcgaaaactccatgggaggtttgaactttggccgatcttactttgatccagcatattttagattaggacaagagatggtcaggaggtcagctgggaaggtcagttccacattggcatctgaactcggtatcacggccgaggatgcaaggcttgtttcagagattgcaatgcatactactgaggacaggatcagtagagcggttggacccaggcaagcccaagtgtcatttctacacggtgatcaaagtgagaatgagctaccgggattgggaggtaaggaagataagagagtcaaacagagtcgaggagaagccagggagagctatagagaaactgggcacagcagagcaaatgatgcgagagctgctgaccttccaaccggcacacccctagacattgacactgcatcggagttcagccaagacccacaggacagtcgaaggtcagctgacgccctgctcaggctgcaagccatggcagggatcccggaagaacaaggctcagacatggacacccctagagtgtacaatgacagagatcttctagactag

SEQ ID NO: 45 - protein, 523 aa, Measles virus
MATLLRSLALFKRNKDKPPITSGSGGAIRGIKHIIIVPIPGDSSITTRSRLLDRLVRLIGNPDVSGPKLTGALIGILSLFVESPGQLIQRITDDPDVSIRLLEVVQSDQSQSGLTFASRGTNMEDEADQYFSHDDPISSDQSRFGWFENKEISDIEVQDPEGFNMILGTILAQIWVLLAKAVTAPDTAADSELRRWIKYTQQRRVVGEFRLERKWLDVVRNIIAEDLSLRRFMVALILDIKRTPGNKPRIAEMICDIDTYIVEAGLASFILTIKFGIETMYPALGLHEFAGELSTLESLMNLYQQMGKPAPYMVNLENSIQNKFSAGSYPLLWSYAMGVGVELENSMGGLNFGRSYFDPAYFRLGQEMVRRSAGKVSSTLASELGITAEDARLVSEIAMHTTEDKISRAVGPRQAQVSFLQGDQSENELPRLGGKEDRRVKQSRGEARESYRETGPSRASDARAAHLPTGTPLDIDTASESSQDPQDSRRSAEPLLSCKPWQESRKNKAQTRTPLQCTMTEIF

SEQ ID NO: 46 - DNA, 1631 bp, Measles virus
atggccacacttttaaggagcttagcattgttcaaaagaaacaaggacaaaccacccattacatcaggatccggtggagccatcagaggaatcaaacacattattatagtaccaatccctggagattcctcaattaccactcgatccagacttctggaccggttggtcaggttaattggaaacccggatgtgagcgggcccaaactaacaggggcactaataggtatattatccttatttgtggagtctccaggtcaattgattcagaggatcaccgatgaccctgacgttagcataaggctgttagaggttgtccagagtgaccagtcacaatctggccttaccttcgcatcaagaggtaccaacatggaggatgaggcggaccaatacttttcacatgatgatccaattagtagtgatcaatccaggttcggatggttcgagaacaaggaaatctcagatattgaagtgcaagaccctgagggattcaacatgattctgggtaccatcctagcccaaatttgggtcttgctcgcaaaggcggttacggccccagacacggcagctgattcggagctaagaaggtggataaagtacacccaacaaagaagggtagttggtgaatttagattggagagaaaatggttggatgtggtgaggaacattattgccgaggacctctccttacgccgattcatggtcgctctaatcctggatatcaagagaacacccggaaacaaacccaggattgctgaaatgatatgtgacattgatacatatatcgtagaggcaggattagccagttttatcctgactattaagtttgggatagaaactatgtatcctgctcttggactgcatgaatttgctggtgagttatccacacttgagtccttgatgaacctttaccagcaaatggggaaacctgcaccctacatggtaaacctggagaactcaattcagaacaagttcagtgcaggatcataccctctgctctggagctatgccatgggagtaggagtggaacttgaaaactccatgggaggtttgaactttggccgatcttactttgatccagcatattttagattagggcaagagatggtaaggaggtcagctggaaaggtcagttccacattagcatctgaactcggtatcactgccgaggatgcaaggcttgtttcagagattgcaatgcatactactgaggacaagatcagtagagcggttggacccagacaagcccaagtatcatttctacagggtgatcaaagtgagaatgagctaccgcgattggggggcaaggaagataggagggtcaaacagagtcgaggagaagccagggagagctacagagaaaccgggcccagcagagcaagtgatgcgagagctgcccatcttccaaccggcacacccctagacattgacactgcatcggagtccagccaagatccgcaggacagtcgaaggtcagctgagcccctgcttagctgcaagccatggcaggaatctcggaagaacaaggctcagacacggacacccctacagtgtacaatgacagaaatcttctagactaggtgcgagaggccgagggccagaacaacatccgcctaccctccatcattgttata

SEQ ID NO: 47 - protein, 300 aa, Measles virus
MHMFPLGVVEDSDPPGPPIGRASGSPPPGAGRSTAKPEELLKEATEANIVVRRTAGLNEKLAFHNNTPPTLPTPRRKAPTTGSVLNANQACNAVNLAPLDTPQRFRVVYMSITRPLDNGYYTVPRRMLEFRSVNAVAFNLLVTLRIDKAIGPGKIIDNAEQLPEATFMVHIGDFRRKKSEVYSADYCKMKIEKMGLVFALGGIGGTSLHTRSTGKMSKTLHAQLGFKKTSCYPPMDINEDLNRLLWRSRCKIVRIQAVLQPSVPQELRIYDDVIINDDQGVFKVLQTVVPSNARKRPPSQ

SEQ ID NO: 48 - DNA, 1454 bp, Measles virus
aggagcaaagtgattgcctcccaagctccacaacgacagagatccacgacctcgacaagtcggcatgggacatcaaggggtcgatcgctccgacacaacccaccacccacagtgatggcaggctggtgccccaggccagagccacagatcctggtctaggcgacaggaagggcgaacgccccatgcacatgtttccgctgggggtcgttgaggacagcgaccccccagggcctccaatcgggcgagcatccgggtccccgcccccaggcgctggcagatccacagcaaaacccgaagaactcctcaaagaggccaccgaggccaacatagtcgtcagacgcacagcagggctcaacgaaaaactggcgttccacaacaataccccaccaactctccccacaccccggagaaaggccccaacaacagggagcgtcctcaacgcaaaccaagcgtgcaatgcggtcaatctggcaccgctggacaccccgcagaggttccgtgttgtctacatgagcatcacccgtcccttggacaacgggtactacaccgttcccagaagaatgctggaattcaggtcggtcaatgcagtggccttcaacctgctggtgacccttagaattgacaaggcgattggccctgggaagatcatcgacaatgcagagcaacttcctgaggcaacattcatggtccacatcggggacttcaggagaaagaagagcgaagtctactctgccgactattgcaagatgaaaatcgaaaagatgggcctggtttttgcacttggtgggatagggggcaccagtcttcacactagaagcacaggcaaaatgagcaagactctccatgcacaactcgggttcaagaagacctcatgttacccaccaatggatatcaatgaagacctcaatcgactactctggaggagcagatgcaagatagtaagaatccaggcagttctgcagccatcagttccccaagaactccgcatttacgacgacgtgatcataaatgatgaccaaggagtattcaaagttctgcagaccgtggtgcccagcaatgcccgaaaacgacccccctcacaatgacagccaaaaggcccggacaaaaaaaccccccccgaaaaactccacggaccaagcgagaggccagccagcagctgacggcaagcgcgaacaccaggcggccccagcacagaacagccccgacacaaggccaccaccagccagcccaatctgcatcctcctcgtgggaccccggaggaccaacccccaaagttgcccccgacccaaaccaccaaccgcatccccaccacccctgggaaagaaacccccagcaactggaaggccccttcccccctccctcaacacaagaaccccacaaccgaaccgcacaagcgaccgaggtgacccaaccgcaggcacccgactccctagatagatcctctccccccgggc

SEQ ID NO: 49 - protein, 295 aa, Measles virus
MHMFPLGVVEDSDPPGPPIGRASGSPPPGAGRSTAKPEELLKEATEANIVVRRTAGLNEKLAFHNNTPPTLPTPRRKAPTTGSVLNANQACNAVNLAPLDTPQRFRVVYMSITRPLDNGYYTVPRRMLEFRSVNAVAFNLLVTLRIDKAIGPGKIIDNAEQLPEATFMVHIGDFRRKKSEVYSADYCKMKIEKMGLVFALGGIGGTSLHTRSTGKMSKTLHAQLGFKKTSCYPPMDINEDLNRLLWRSRCKIVRIQAVLQPSVPQELRIYDDVIINDDQGVFKVLQTVVPSNARK

SEQ ID NO: 50 - DNA, 1454 bp, Measles virus
aggagcaaagtgattgcctcccaagctccacaacgacagagatccacgacctcgacaagtcggcatgggacatcaaggggtcgatcgctccgacacaacccaccacccacagtgatggcaggctggtgccccaggccagagccacagatcctggtctaggcgacaggaagggcgaacgccccatgcacatgtttccgctgggggtcgttgaggacagcgaccccccagggcctccaatcgggcgagcatccgggtccccgcccccaggcgctggcagatccacagcaaaacccgaagaactcctcaaagaggccaccgaggccaacatagtcgtcagacgcacagcagggctcaacgaaaaactggcgttccacaacaataccccaccaactctccccacaccccggagaaaggccccaacaacagggagcgtcctcaacgcaaaccaagcgtgcaatgcggtcaatctggcaccgctggacaccccgcagaggttccgtgttgtctacatgagcatcacccgtcccttggacaacgggtactacaccgttcccagaagaatgctggaattcaggtcggtcaatgcagtggccttcaacctgctggtgacccttagaattgacaaggcgattggccctgggaagatcatcgacaatgcagagcaacttcctgaggcaacatttatggtccacatcggggacttcaggagaaagaagagtgaagtctactctgccgattattgcaagatgaaaatcgaaaagatgggcctggtttttgcacttggtgggatagggggcaccagtcttcacactagaagcacaggcaaaatgagcaagactctccatgcacaactcgggttcaagaagacctcatgttacccaccaatggatatcaatgaagacctcaatcgattactctggaggagcagatgcaagatagtaagaatccaggcagttctgcagccatcagttccccaagaactccgcatttacgacgacgtgatcataaatgatgaccaaggagtattcaaagttctgcagaccgtggtgcccagcaatgcccgaaaatgacccccctcacaatgacaaccaaaaggcccggacaaaaaaaccccccccgaaaaactccacggaccaagcgagaggccagccagcagctgacggcaagcgcgaacaccaggcggccccagcacagaacagccccgacacaaggccaccaccagccagcccaatctgcatcctcctcgtgggaccccggaggaccaacccccaaagttgcccccgacccaaaccaccaaccgcatccccaccacccccgggaaagaaacccccagcaactggaaggccccttcccccctccctcaacacaagaaccccacaaccgaaccgcacaagcgaccgaggtgacccaaccgcaggcacccgactccctagatagatcctctccccccgggc

SEQ ID NO: 51 - protein, 335 aa, Measles virus
MTEIYDFDKSAWDIKGSIAPIQPTTYSDGRLVPQVRVIDPGLGDRKDECFMYMFLLGVVEDSDSLGPPIGRAFGSLPLGVGRSTAKPEKLLKEATELDIVVRRTAGLNEKLVFYNNTPLTLLTPWRKVLTTGSVFNANQVCNAVNLIPLDTPQRFRVVYMSITRLSDNGYYTVPRRILEFRSVNAVAFNLLVTLRIDKAIGPGKIIDNTEQLPEATFMVHIGNFMRNKSEVYSADYCKMKIEKMGLVFALGGIGGTSLHIRSTGKMSKTLHAQLGFKKTLCYPLIDINEDLNRLLWRSRCKIVRIQAVLQPSVPQEFRIYDDVIINDDQGLFKVL

SEQ ID NO: 52 - DNA, 1008 bp, Measles virus
atgacagagatctacgacttcgacaagtcggcatgggacatcaaagggtcgatcgctccgatacaacccaccacctacagtgatggcaggctggtgccccaggtcagagtcatagatcctggtctaggcgacaggaaggatgaatgctttatgtacatgtttctgctgggggttgttgaggacagcgattccctagggcctccaatcgggcgagcatttgggtccctgcccttaggtgttggcagatccacagcaaagcccgaaaaactcctcaaagaggccactgagcttgacatagttgttagacgtacagcagggctcaatgaaaaactggtgttctacaacaacaccccactaactctcctcacaccttggagaaaggtcctaacaacagggagtgtcttcaacgcaaaccaagtgtgcaatgcggttaatctgataccgctcgataccccgcagaggttccgtgttgtttatatgagcatcacccgtctttcggataacgggtattacaccgttcctagaagaatactggaattcagatcggtcaatgcagtggccttcaacctgctggtgacccttaggattgacaaggcgataggccctgggaagatcatcgacaatacagagcaacttcctgaggcaacatttatggtccacatcgggaacttcatgagaaataagagtgaagtctactctgccgattattgcaaaatgaaaatcgaaaagatgggcctggtttttgcacttggtgggatagggggcaccagtcttcacattagaagcacaggcaaaatgagcaagactctccatgcacaactcgggttcaagaagaccttatgttacccgctgatagatatcaatgaagaccttaatcgattactctggaggagcagatgcaagatagtaagaatccaggcagttttgcagccatcagttcctcaagaattccgcatttacgacgacgtgatcataaatgatgaccaaggactattcaaagttctgtag

SEQ ID NO: 53 - protein, 257 aa, Bovine respiratory syncytial virus
MSNHTHQLKFKTLKRAWKASKYFIVGLSCLYKFNLKSLVQTALTTLAMITLTSLVITAIIYISVGNAKAKPTFKPTIQQTQQPQNHTSPLFTEHNHKSTHTSIQSTTLSQPLNIDTTRGTTYSHSTDETQNRKNKSQSTLPANRQPPINPSGSNPPENHQDHNNSQTLPYVPCSTCKGNLACSSLCQIGLERAPSRAPTITLKRASKPKTTKKPTKTTTHHRTSPEAKLQPKNNTAAPQQGILSSPEHHTDQSTTQI

SEQ ID NO: 54 - DNA, 774 bp, Bovine respiratory syncytial virus
atgtccaaccatacccatcaacttaaattcaagacattaaagagggcttggaaagcctcaaaatacttcatagtaggattatcatgtttatataagttcaatttaaaatcccttgtccaaacggctttgaccaccttagctatgataaccttgacatcactcgtcataacagccattatttacattagtgtgggaaatgctaaagccaagcccacattcaaaccaaccatccaacaaacacaacagccccaaaaccatacctcacctcttttcacagagcacaaccacaaatcaactcacacatcaatccaaagcaccacactatcccaaccactaaacatagacaccactagaggaactacatacagtcactcaaccgatgaaacccaaaatagaaaaaacaaaagccaatccactctacctgccaacagacaaccaccaatcaacccatcgggaagcaacccccctgaaaaccaccaagaccacaacaactcccaaacactcccctatgtgccttgcagtacatgtaaaggcaatcttgcttgctcatcactctgccaaatcgggctggagagagcaccaagcagagcccccacaatcaccctaaaaagggcgtcaaaacccaaaaccaccaaaaaaccaaccaagacaacaacccaccacagaactagccctgaagccaaactgcaacccaaaaacaacacggcagctccacaacaaggcatcctctcttcaccagagcaccacacagatcaatcaactacacagatctaa

SEQ ID NO: 55 - protein, 295 aa, Human respiratory syncytial virus
MSKNKNQRTARTLEKTWDTLNHLIVISSCLYRLNLKSIAQIALSVLAMIISTSLIIAAIIFIISANHKVTPTTVTVQTIKNHTEKNITTYLTHVSPERVSPSKQPTTTLPIHTNSATISPNTKSETHHTTAQTKGIITTPTQTNKPSTKPRPKNPPKKPKDDYHFEVFNFVPCSICGNNQLCKSICKTIPSNKPKKKPTIKPTNKPTTKTTNKRDPKTLAKTLKKENTTNPTKKPTLKTTERDTSTPQSTVLDTTTSKHTIQQQSLHSTTPENTPNSTQIPTASEPSTSNSTQKI

SEQ ID NO: 56 - DNA, 921 bp, Human respiratory syncytial virus
ggggcaaatgcaaccatgtccaaaaacaagaatcaacgcactgccaggactctagaaaagacctgggatactcttaatcatctaattgtgatatcctcttgtttatacagattaaatttaaaatctatagcacaaatagcactatcagttttggcaatgataatctcaacctctctcataattgcagccataatattcatcatctctgccaatcacaaagttacaccaacaacggtcacagttcaaacaataaaaaaccacactgaaaaaaacatcaccacttaccttactcatgtctcaccagaaagggttagcccatccaaacaacccacaaccacactaccaatccacacaaactcagccacaatatcacctaatacaaaatcagaaacacaccatacaacagcacaaaccaaaggcataatcaccactccaacacagaccaacaagccaagcacaaaaccacgtccaaaaaatccaccaaaaaaaccaaaagatgattaccattttgaagtgttcaacttcgttccctgtagtatatgtggcaacaaccaactttgcaaatccatctgcaaaacaataccaagcaacaaaccaaagaaaaaaccaaccatcaaacccacaaacaaaccaaccaccaaaaccacaaacaaaagagacccaaaaacactagccaaaacgctgaaaaaagaaaacaccaccaacccaacaaaaaaaccaaccctcaagaccacagaaagagacaccagcactccacaatccaccgtgctcgacacaaccacatcaaaacacacaatccaacagcaatccctccactcaaccacccccgaaaacacacccaactccacacaaatacccacagcatccgagccctccacatcaaattccacccaaaaaatctagtcacatgcttagttattc

SEQ ID NO: 57 - protein, 315 aa, Human respiratory syncytial virus
MSKNKNQRTARTLEKTWDTLNHLIVISSCLYKLNLKSIAQIALSVLAMIISTSLIIAAIIFIISANHKVTLTTVTVQTIKNHTEKNITTYLTQVSPERVSPSKQPTTTPPIHTNSATISPNTKSETHHTTAQTKGRTTTPTQNNKPSTKPRPKNPPKKPKDDYHFEVFNFVPCSICGNNQLCKSICKTIPSNKPKKKPTIKPTNKPPTKTTNKRDPKTLAKTLKKETTINPTKKPTPKTTEGDTSTSQSTVLDTTTSKHTERDTSTSQSTVLDTTTSKHTIQQQSLYSTTPENTPNSTQTPTASEPSTSNSTQKL

SEQ ID NO: 58 - DNA, 981 bp, Human respiratory syncytial virus
ggggcaaatgcaaccatgtccaaaaacaagaatcaacgcactgccaggactctagaaaagacctgggatactcttaatcatctaattgtaatatcctcttgtttatacaaattaaatttaaaatctatagcacaaatagcactatcagttttggcaatgataatctcaacctctctcataattgcagccataatattcatcatctctgccaatcacaaagttacactaacaactgtcacagttcaaacaataaaaaaccacactgagaaaaacatcaccacttaccttactcaagtctcaccagaaagggttagcccatccaaacaacccacaaccacaccaccaatccacacaaactcagccacaatatcacctaatacaaaatcagaaacacaccatacaacagcacaaaccaaaggcagaaccaccactccaacacagaacaacaagccaagcacaaaaccacgtccaaaaaatccaccaaaaaaaccaaaagatgattaccattttgaagtattcaacttcgttccctgtagtatatgtggcaacaatcaactctgcaaatccatttgcaaaacaataccaagcaataaaccaaagaaaaaaccaaccataaaacccacaaacaaaccacccaccaaaaccacaaacaaaagagacccaaaaactctagccaaaacactgaaaaaagaaactaccatcaacccaacaaaaaaaccaacccccaagaccacagaaggagacaccagcacctcacagtccactgtgctcgacacaaccacatcaaagcacacagaaagagacaccagcacctcacaatccactgtgctcgacacaaccacatcaaaacacacaatccaacagcaatccctctactcaaccacccctgaaaacacacccaactccacacaaacacccacagcatccgagccctccacatcaaattccacccaaaaactctagtcatatgcttagttattc

SEQ ID NO: 59 - protein, 574 aa, Human respiratory syncytial virus
MELPILKTNAITTILAAVTLCFASSQNITEEFYQSTCSAVSKGYLSALRTGWYTSVITIELSNIKENKCNGTDAKAKLIKQELDKYKNAVTELQLLMQSTPAANNRARRELPRFMNYTLNNTKNTNVTLSKKRKRRFLGFLLGVGSAIASGIAVSKVLHLEGEVNKIKSALLSTNKAVVSLSNGVSVLTSKVLHLKNYIDKQFLPIVNKQSCSISNIATVIEFQQKNNRLLEITREFSVNAGVTTPVSTYMLTNSELLSLINDMPITNDQKKLMSNNVQIVRQQSYSIMSIIKEEVLAYVVQLPLYGVMDTPCWKLHTSPLCTTNTKEGSNICLTRTDRGWYCDNAGSVSFFPQAETCKVQSNRVFCDTMNSLTLPSEVNLCNIDIFNPKYDCKIMTSKTDVSSSVITSLGAIVSCYGKTKCTASNKNRGIIKTFSNGCDYVSNKGVDTVSVGNTLYYVNKQEGKSLYVKGEPIINFYDPLVFPSDEFDASISQVNEKINQSLAFIRKSDELLHNVNAGKSTINIMITTIIIVIIVILLSLIAVGLLLYCKARSTPVTLSKDQLSGINNIAFSS

SEQ ID NO: 60 - DNA, 1899 bp, Human respiratory syncytial virus
cgcgcaaataacaatggagttgccaatcctcaaaacaaatgctattaccacaatccttgctgcagtcacactctgtttcgcttccagtcaaaacatcactgaagaattttatcaatcaacatgcagtgcagttagcaaaggctatcttagtgctctaagaactggttggtatactagtgttataactatagaattaagtaatattaaagaaaataagtgtaatggaacagacgccaaggcaaaattgataaaacaagaattagataaatataaaaatgctgtaacagaattgcagttgctcatgcaaagtactccagcagccaacaatcgagccagaagagaactaccaaggtttatgaattatacactcaacaataccaaaaacaccaatgtaacattaagcaagaaaaggaaaagaagatttcttggttttttgttaggtgttggatctgcaatcgccagtggcattgccgtatccaaggtcctacacctagaaggggaagtgaacaaaatcaaaagtgctctactatccacaaacaaggctgtagtcagcttatcaaatggagtcagtgttttaaccagcaaagtgttacatctcaaaaactatatagataaacagttcttacctattgtgaacaagcaaagctgcagcatatcaaacattgcgactgtgatagagttccaacaaaagaacaacagactactagagattaccagggaatttagtgttaatgcaggcgtaactacacctgtaagtacttatatgttaactaatagtgaattattatcattaatcaatgatatgcctataacaaatgatcagaaaaagttaatgtccaacaatgtccaaatagttagacagcaaagttactctatcatgtccataataaaggaggaagtcttagcatatgtagtacaattaccactatatggtgtaatggatacaccttgttggaaactgcacacatcccctctatgtacaaccaacacaaaggaagggtccaacatctgcttaacaagaaccgacagaggatggtactgtgacaatgcaggatcagtatctttcttcccacaagctgaaacatgtaaagttcaatcgaatcgggtattttgtgacacaatgaacagtttaacattaccaagtgaggtaaatctctgcaacattgacatattcaaccccaaatatgattgtaaaattatgacttcaaaaacagatgtaagcagctccgttatcacatctctaggagccattgtgtcatgctatggcaaaactaaatgtacagcatccaataaaaatcgtgggatcataaagacattttctaacgggtgtgattatgtatcaaataagggggtggatactgtgtctgtaggtaatacattatattatgtaaataagcaagaaggcaaaagtctctatgtaaaaggtgaaccaataataaatttctatgacccattagtgttcccctctgatgaatttgatgcatcaatatctcaagtcaatgagaagattaaccagagtctagcatttattcgtaaatcagatgaattattacataatgtaaatgctggtaaatccaccattaatatcatgataactactataattatagtgattatagtaatattgttatcattaattgcagttggactgcttctatactgcaaggccagaagcacaccagtcacactaagtaaggatcaactgagtggtataaataatattgcatttagtagctgaataaaaatagcacttaatcatattcttacaatggttcactatctgaccatagataacccatctatcattggattttcttaaaatttgaacttcatcacaactttcatctataaaccatctcacttacactatttaagtagattcctagtttatagttatat

SEQ ID NO: 61 - protein, 574 aa, Human respiratory syncytial virus
MELPILKANAITTILAAVTFCFASSQNITEEFYQSTCSAVSKGYLSALRTGWYTSVITIELSNIKENKCNGTDAKVKLMKQELDKYKNAVTELQLLMQSTPAANNRARRELPRFMNYTLNNTKKTNVTLSKKRKRRFLGFLLGVGSAIASGIAVSKVLHLEGEVNKIKSALLSTNKAVVSLSNGVSVLTSKVLDLKNYIDKQLLPIVNKQSCRISNIETVIEFQQKNNRLLEITREFSVNAGVTTPVSTYMLTNSELLSLINDMPITNDQKKLMSNNVQIVRQQSYSIMSIIKEEVLAYVVQLPLYGVIDTPCWKLHTSPLCTTNTKEGSNICLTRTDRGWYCDNAGSVSFFPQAETCKVQSNRVFCDTMNSLTLPSEVNLCNVDIFNPKYDCKIMTSKTDVSSSVITSLGAIVSCYGKTKCTASNKNRGIIKTFSNGCDYVSNKGVDTVSVGNTLYYVNKQEGKSLYVKGEPIINFYDPLVFPSDEFDASISQVNEKINQSLAFIRKSDELLHNVNAGKSTTNIMITTIIIVIIVILLSLIAVGLLLYCKARSTPVTLSKDQLSGINNIAFSN

SEQ ID NO: 62 - DNA, 1864 bp, Human respiratory syncytial virus
taacaatggagttgccaatcctcaaagcaaatgcaattaccacaatcctcgctgcagtcacattttgctttgcttctagtcaaaacatcactgaagaattttatcaatcaacatgcagtgcagttagcaaaggctatcttagtgctctaagaactggttggtatactagtgttataactatagaattaagtaatatcaaggaaaataagtgtaatggaacagatgctaaggtaaaattgatgaaacaagaattagataaatataaaaatgctgtaacagaattgcagttgctcatgcaaagcacaccagcagcaaacaatcgagccagaagagaactaccaaggtttatgaattatacactcaacaataccaaaaaaaccaatgtaacattaagcaagaaaaggaaaagaagatttcttggttttttgttaggtgttggatctgcaatcgccagtggcattgctgtatctaaggtcctgcacttagaaggagaagtgaacaagatcaaaagtgctctactatccacaaacaaggccgtagtcagcttatcaaatggagttagtgtcttaaccagcaaagtgttagacctcaaaaactatatagataaacaattgttacctattgtgaataagcaaagctgcagaatatcaaatatagaaactgtgatagagttccaacaaaagaacaacagactactagagattaccagggaatttagtgttaatgcaggtgtaactacacctgtaagcacttacatgttaactaatagtgaattattgtcattaatcaatgatatgcctataacaaatgatcagaaaaagttaatgtccaacaatgttcaaatagttagacagcaaagttactctatcatgtccataataaaagaggaagtcttagcatatgtagtacaattaccactatatggtgtgatagatacaccttgttggaaattacacacatcccctctatgtacaaccaacacaaaagaagggtcaaacatctgtttaacaagaactgacagaggatggtactgtgacaatgcaggatcagtatctttcttcccacaagctgaaacatgtaaagttcaatcgaatcgagtattttgtgacacaatgaacagtttaacattaccaagtgaagtaaatctctgcaatgttgacatattcaatcccaaatatgattgtaaaattatgacttcaaaaacagatgtaagcagctccgttatcacatctctaggagccattgtgtcatgctatggcaaaactaaatgtacagcatccaataaaaatcgtggaatcataaagacattttctaacgggtgtgattatgtatcaaataaaggggtggacactgtgtctgtaggtaacacattatattatgtaaataagcaagaaggcaaaagtctctatgtaaaaggtgaaccaataataaatttctatgacccattagtattcccctctgatgaatttgatgcatcaatatctcaagtcaatgagaagattaaccagagtttagcatttattcgtaaatccgatgaattattacataatgtaaatgctggtaaatcaaccacaaatatcatgataactactataattatagtgattatagtaatattgttatcattaattgctgttggactgctcctatactgtaaggccagaagcacaccagtcacactaagcaaggatcaactgagtggtataaataatattgcatttagtaactgaataaaaatagcacctaatcatgttcttacaatggtttactatctgctcatagacaacccatctatcattggattttcttaaaatctgaacttcatcgaaactcttatctataaaccatctcacttacactattt

SEQ ID NO: 63 - protein, 538 aa, Turkey rhinotracheitis virus
MDVRICLLLFLISNPSSCIQETYNEESCSTVTRGYKSVLRTGWYTNVFNLEIGNVENITCNDGPSLIDTELVLTKNALRELKTVSADQVAKESRLSSPRRRRFVLGAIALGVATAAAVTAGVALAKTIRLEGEVKAIKNALRNTNEAVSTLGNGVRVLATAVNDLKEFISKKLTPAINQNKCNIADIKMAISFGQNNRRFLNVVRQFSDSAGITSAVSLDLMTDDELVRAINRMPTSSGQISLMLNNRAMVRRKGFGILIGVYDGTVVYMVQLPIFGVIETPCWRVVAAPLCRKEKGNYACILREDQGWYCTNAGSTAYYPNKDDCEVRDDYVFCDTAAGINVALEVEQCNYNISTSKYPCKVSTGRHPVSMVALTPLGGLVSCYESVSCSIGSNKVGIIKQLGKGCTHIPNNEADTITIDNTVYQLSKVVGEQRTIKGAPVVNNFNPILFPEDQFNVALDQVFESIDRSQDLIDKSNDLLGADAKSKAGIAIAIVVLVILGIFFLLAVIYYCSRVRKTKPKHDYPATTGHSSMAYVS

SEQ ID NO: 64 - DNA, 1636 bp, Turkey rhinotracheitis virus
gggacaagtaggatggatgtaagaatctgtctcctattgttccttatatctaatcctagtagctgcatacaagaaacatacaatgaagaatcctgcagtactgtaactagaggttataagagtgtgttaaggacagggtggtatacgaatgtatttaacctcgaaatagggaatgttgagaacatcacttgcaatgatggacccagcctaattgacactgagttagtactcacaaagaatgctttgagggagctcaaaacagtgtcagctgatcaagtggctaaggaaagcagactatcctcacccaggagacgtagatttgtactgggtgcaatagcacttggtgttgcgacagctgctgccgtaacagctggtgtagcacttgcaaagacaattagattagagggagaggtgaaggcaattaagaatgccctccggaacacaaatgaggcagtatccacattagggaatggtgtgagggtactagcaactgcagtcaatgacctcaaagaatttataagtaaaaaattgactcctgctattaaccagaacaaatgcaatatagcagatataaagatggcaattagttttggccaaaataacagaaggttcctgaatgtggtgaggcaattctctgatagtgcaggtatcacatcagctgtgtctcttgatttaatgacagatgatgaacttgttagagcaattaacagaatgccaacttcatcaggacagattagtttgatgttgaacaatcgtgccatggttagaaggaaggggtttggtatattgattggtgtttatgatggaacggtcgtttatatggtacaactgcccatattcggcgtgattgagacaccttgttggagggtggtggcagcaccactctgtaggaaagagaaaggcaattatgcttgtatactgagagaagatcaagggtggtactgtacaaatgctggctctacagcttattatcctaataaagatgattgtgaggtaagggatgattatgtattttgtgacacagcagctggcattaatgtggccctagaagttgaacagtgcaactataacatatcgacttctaaatacccatgcaaagtcagcacaggtagacaccctgtcagtatggtagccttaacccccctagggggtctagtgtcttgttatgagagtgtaagttgctccataggtagcaataaagtagggataataaaacagctaggcaaagggtgcacccacattcccaacaacgaagctgacacgataaccattgataacactgtgtaccaattgagcaaggttgtaggcgaacagaggaccataaaaggagctccagttgtgaacaattttaacccaatattattccctgaggatcagttcaatgttgcacttgaccaagtatttgagagtatagatagatctcaggacttaatagataagtctaacgacttgctaggtgcagatgccaagagcaaggctggaattgctatagcaatagtagtgctagtcattctaggaatcttctttttacttgcagtgatatattactgttccagagtccggaagaccaaaccaaagcatgattacccggccacgacaggtcatagcagcatggcttatgtcagttaagttattt

SEQ ID NO: 65 - protein, 256 aa, Ovine respiratory syncytial virus
METYVNKLHEGSTYTAAVQYNVLEKDDDPASLTIWVPMFQSSISADLLIKELINVNILVRQISTLKGPSLKIMINSRSAVLAQMPNKFTISANVSLDERSKLAYDITTPCEIKACSLTCLKVKNMLTTVKDLTMKTFNPTHEIIALCEFENIMTSKKVVIPTFLRSINVKAKDLDSLENIATTEFKNAITNAKIIPYAGLVLVITVTDNKGAFKYIKPQSQFIVDLGAYLEKESIYYVTTNWKHTATRFSIKPIED

SEQ ID NO: 66 - DNA, 948 bp, Ovine respiratory syncytial virus
ggggcaaatatggagacatacgtgaacaaactccatgaagggtcaacatacacagctgctgtccaatacaatgttctagaaaaggatgatgatcctgcatctctcacgatatgggttcctatgtttcaatcatccatttctgctgacttactcataaaggagttaatcaatgtgaacatattagtacgacaaatttctactctgaaaggcccatcattaaaaattatgataaactctagaagtgctgtactagctcaaatgcccaacaagtttactataagtgcaaatgtgtcattggatgaacggagcaagttggcatatgacataaccaccccttgtgagatcaaagcttgcagtttgacatgcttaaaagtaaaaaatatgctcactactgtaaaagatcttactatgaaaacattcaatcccactcatgaaatcattgcactgtgtgaatttgaaaatattatgacgtctaagaaagttgtaataccaacttttttaaggtctattaatgtgaaggcaaaggatttagattcactggaaaacatagctacaacagagtttaaaaatgccatcactaatgctaaaattataccttacgctgggttagtgttagtcattaccgtaactgacaacaaaggagcatttaagtatatcaagccacaaagccaatttatagttgatcttggtgcatatcttgaaaaagagagcatatattatgtaactacaaattggaaacacacagccactagattctccatcaaacctatagaagattaaatcctaaacaaattatcttgccaaaatagaacactctattaagaacctacaaaacaccattgaaatcaaatcctattgatactccattgaacatcactgtcacacattcccaatctggtcaattcacttgatcatctattctgttaattatacctctattagataaat

SEQ ID NO: 67 - protein, 186 aa, Ovine respiratory syncytial virus
MSRRNPCKYEIRGHCLNGKKCHFSHNYFEWPPHALLVRQNFMLNKILKSMDRSNDTLSEISGAAELDRTEEYALGVIGVLESYLGSVNNITKQSACVAMSKLLGEINSDDIKGLRNKELPTSPKIRIYNTVISYIDSNKRNPKQTIHLLKRLPADVLKKTIKNTIDIHNEINVNNPSDIGVNEQNE

SEQ ID NO: 68 - DNA, 964 bp, Ovine respiratory syncytial virus
ggggcaaatatgtcacgaagaaatccctgcaaatatgagatcaggggacattgcttaaatggcaaaaaatgccatttcagccataattactttgaatggcctccacatgctttattagtgaggcaaaattttatgttaaacaagatattaaagtctatggataggagcaatgatactctgtcagagataagtggagctgcagaattagatagaacagaggaatatgcattaggtgtgataggagttttagaaagttacttgggctctgttaataacataacaaaacaatcagcttgtgttgctatgagtaaattattaggtgagattaatagtgatgacatcaaaggattaagaaacaaagaattgccaacttcacctaagataagaatatataacacagttatatcatatattgatagcaacaagagaaacccaaaacaaactatacatttacttaaaagattgcctgcagatgtgcttaagaagaccatcaagaatacaatagatattcacaatgaaataaatgttaataatccaagtgacataggtgttaatgaacaaaatgaataattccaatatcattattttcccagagaaatatccttgtagtatatcttctttgttaatcagagatgagaataatgttattgtattaaatcatcagaatatttttgactgctcacagtctcaacatccatgtgatatgtatcctcaaaatcatatacttgactatacctattggacatcacaggaattgattgacgatgtactaaagattcttcacctttctagcatccccataaataggtatgtggtctatgtcttagtgctgtagtatgtaaatcatttaactttcaatcattatctatatatttctccttgtagccggaaatacaccagaggacaaaatggactcactcattcatgaaaactcaaccaatgtatacttaacagatagttattt

SEQ ID NO: 69 - protein, 391 aa, Ovine respiratory syncytial virus
MALSKVKLNDTFNKDQLLSTSKYTIQRSTGDNIDIPNYDVQKHLNKLCGMLLITEDANHKFTGLIGMLYAMSRLGREDTLKILKDAGYQVKANGVDVITHRQDVNGKEMKFEVLTLVSLTSEVQVNIEVESRKSYKKMLKEMGEVAPEYRHDSPDCGMIVLCIAALVIAKLAAGDRSGLTAVIRRANNVLKNEIERYKGLIPKDVANSFYEVFEKYPHYIDVFVHFGIAQSSTRGGSRVEGIFAGLFMNAYGAGQVMLRWGVLAKSVKNIMLGHASVQAEMEQVVEVYEYAQKLGGEAGFYHILNNPKASLLSLTQFPNFSSVVLGNAAGLGIMGEYRGTPRNQDLYDAAKAYAEQLKENGVINYSVLDLTTEELEAIKNQLNPKDNDVEL

SEQ ID NO: 70 - DNA, 1197 bp, Ovine respiratory syncytial virus
ggggcaaatacaaaaatggctctcagcaaggttaaactgaatgacaccttcaacaaagatcaattgctatcaactagcaaatataccatccaacgtagcactggagataatattgacatacctaattatgatgtacaaaagcatctcaataaattgtgtggtatgctgctaataacagaagatgctaatcacaaatttacaggattaataggtatgttatatgccatgtctcgattgggaagggaagataccctcaaaatactcaaggatgcaggttaccaagtaaaggccaatggagttgatgtaattacacatcgacaagatgtaaatggaaaagaaatgaaatttgaagtgctaacactagtcagcttaacatcagaagttcaagttaacattgaggtagaatcaaggaaatcttacaaaaagatgctaaaagagatgggagaggtagctccagaatacagacatgattctcctgattgtggtatgatagtgctatgtattgctgctttggttatagcaaaattagcagcaggggatagatcaggcctcaccgcagtcatcagaagagccaacaatgtgcttaagaatgaaatagagcgatacaagggacttataccaaaggatgtagccaacagcttctatgaagtatttgaaaagtatcctcattatatagacgtatttgtacattttggaattgctcagtcctcaacaagaggaggtagtagggtagaggggatctttgcagggttattcatgaatgcgtatggagcaggtcaagtaatgttaagatggggtgtattagccaaatcagtcaagaatatcatgcttggtcatgccagtgtgcaagctgaaatggaacaagttgtagaagtctatgaatatgcacaaaaattaggaggagaagcaggtttctaccacatattaaacaacccaaaagcatcattattgtcccttacacagtttcctaacttctccagtgtagtcctaggtaatgctgctggtttgggaataatgggtgagtatagaggtacacctaggaatcaggatttatatgatgctgccaaagcatatgcagaacaactgaaagagaatggagtcatcaattacagtgtattagatctaactacagaggaattagaggcaatcaagaaccagctaaatcccaaggataatgatgtggaactgtgagttaat

SEQ ID NO: 71 - protein, 467 aa, Human respiratory syncytial virus
MALSKVKLNDTLNKDQLLSSSKYTIQRSTGDSIDTPNYDVQKHINKLCGMLLITEDANHKFTGLIGMLYAMSRLGREDTIKILRDAGYHVKANGVDVTTHRQDINGKEMKFEVLTLASLTTEIQINIEIESRKSYKKMLKEMGEVAPEYRHDSPDCGMIILCIAALVITKLAAGDRSGLTAVIRRANNVLKNEMKRYKGLLPKDIANSFYEVFEKHPHFIDVFVHFGIAQSSTRGGSRVEGIFAGLFMNAYGAGQVMLRWGVLAKSVKNIMLGHASVQAEMEQVVEVYEYAQKLGGEAGFYHILNNPKASLLSLTQFPHFSSVVLGNAAGLGIMGEYRGTPRNQDLYDAAKAYAEQLKENGVINYSVLDLTAEELTLKTTKKDPKPQTTKSKEVPTTKPTEEPTINTTKTNIITTLLTSNTTGNPELTSQMETFHSTSSEGNPSPSQVSTTSEYPSQPSSPPNTPRQ

SEQ ID NO: 72 - DNA, 1421 bp, Human respiratory syncytial virus
caaatacaaagatggctcttagcaaagtcaagttgaatgatacactcaacaaagatcaacttctgtcatccagcaaatacaccatccaacggagcacaggagatagtattgatactcctaattatgatgtgcagaaacacatcaataagttatgtggcatgttattaatcacagaagatgctaatcataaattcactgggttaataggtatgttatatgcgatgtctaggttaggaagagaagacaccataaaaatactcagagatgcgggatatcatgtaaaagcaaatggagtagatgtaacaacacatcgtcaagacattaatggaaaagaaatgaaatttgaagtgttaacattggcaagcttaacaactgaaattcaaatcaacattgagatagaatctagaaaatcctacaaaaaaatgctaaaagaaatgggagaggtagctccagaatacaggcatgactctcctgattgtgggatgataatattatgtatagcagcattagtaataactaaattagcagcaggggacagatctggtcttacagccgtgattaggagagctaataatgtcctaaaaaatgaaatgaaacgttacaaaggcttactacccaaggacatagccaacagcttctatgaagtgtttgaaaaacatccccactttatagatgtttttgttcattttggtatagcacaatcttctaccagaggtggcagtagagttgaagggatttttgcaggattgtttatgaatgcctatggtgcagggcaagtgatgttacggtggggagtcttagcaaaatcagttaaaaatattatgttaggacatgctagtgtgcaagcagaaatggaacaagttgttgaggtttatgaatatgcccaaaaattgggtggtgaagcaggattctaccatatattgaacaacccaaaagcatcattattatctttgactcaatttcctcacttctccagtgtagtattaggcaatgctgctggcctaggcataatgggagagtacagaggtacaccgaggaatcaagatctatatgatgcagcaaaggcatatgctgaacaactcaaagaaaatggtgtgattaactacagtgtactagacttgacagcagaagaactaaccctcaagacaaccaaaaaagatcccaaacctcaaaccactaaatcaaaggaagtacccaccaccaagcccacagaagagccaaccatcaacaccaccaaaacaaacatcataactacactactcacctccaacaccacaggaaatccagaactcacaagtcaaatggaaaccttccactcaacttcctccgaaggcaatccaagcccttctcaagtctctacaacatccgagtacccatcacaaccttcatctccacccaacacaccacgccagtagttactt

SEQ ID NO: 73 - protein, 391 aa, Bovine respiratory syncytial virus
MALSKVKLNDTFNKDQLLSTSKYTIQRSTGDNIDIPNYDVQKHLNKLCGMLLITEDANHKFTGLIGMLYAMSRLGREDTLKILKDAGYQVRANGVDVITHRQDVNGKEMKFEVLTLVSLTSEVQGNIEIESRKSYKKMLKEMGEVAPEYRHDFPDCGMIVLCVAALVITKLAAGDRSGLTAVIRRANNVLRNEMKRYKGLIPKDIANSFYEVFEKYPHYIDVFVHFGIAQSSTRGGSRVEGIFAGLFMNAYGAGQVMLRWGVLAKSVKNIMLGHASVQAEMEQVVEVYEYAQKLGGEAGFYHILNNPKASLLSLTQFPNFSSVVLGNAAGLGIMGEYRGTPRNQDLYDAAKAYAEQLKENGVINYSVLDLTTEELEAIKNQLNPKDNDVEL

SEQ ID NO: 74 - DNA, 1197 bp, Bovine respiratory syncytial virus
  misc_feature (1)..(1): n is a, c, g, or t
ngggcaaatacaaaaatggctcttagcaaggtcaaactaaatgacactttcaacaaggaccaactgttgtcaaccagcaaatatactattcaacgtagtacaggtgacaacattgatatacccaattacgatgtgcaaaaacatctcaataagttgtgtggtatgctattaataacagaagatgccaatcataaatttacaggactgataggtatgttatatgctatgtcccgattggggagagaagatacccttaaaatactcaaagatgcaggctaccaagtgagggccaatggggttgatgtgataacacatcgacaggatgtgaatggaaaagaaatgaaatttgaagtgctaacattagtcagcttaacatcagaagttcaaggtaatatagaaatagagtcaaggaagtcttacaaaaagatgctaaaagagatgggagaggtagctccagaatacagacatgactttcctgattgtggtatgatagtgctatgtgttgctgctttggttataacaaaattagcagcaggtgataggtcaggcctcactgcagtcattaggagagccaacaatgtactaaggaatgaaatgaaacgatacaaaggactcatcccgaaagatatagccaacagcttctatgaagtatttgaaaagtaccctcattacatagatgtattcgtacattttggcattgctcaatcctcaactagaggaggtagtagggtagaaggaatctttgcagggttattcatgaatgcatatggagcaggtcaagtgatgttaagatggggtgtgctagccaaatcagtcaagaacattatgcttggtcatgccagcgtacaagcagaaatggaacaggttgtagaagtctatgaatatgcacaaaagttaggtggagaagctggtttttatcacatactgaacaatcctaaagcatcattgttatccttgacacaattccccaacttctctagtgtagtcctaggcaatgctgcaggactaggtataatgggtgagtatagaggtacaccaagaaaccaagacttgtatgatgctgccaaagcatatgcagaacaactaaaagagaatggggtcatcaattacagtgtgttggatctgactacagaggaattagaggcaatcaagaaccaattgaatcccaaagataatgatgtggaattgtgagttaat

SEQ ID NO: 75 - protein, 515 aa, Human parainfluenza virus 3
MLSLFDTFNARRQENITKSAGGAIIPGQKNTVSIFALGPTITDDNEKMTLALLFLSHSLDNEKQHAQRAGFLVSLLSMAYANPELYLTTNGSNADVKYVIYMIEKDLKRQKYGGFVVKTREMIYEKTTEWIFGSDLDYDQETMLQNGRNNSTIEDLVHTFGYPSCLGALIIQIWIVLVKAITSISGLRKGFFTRLEAFRQDGTVQAGLVLSGDTVDQIGSIMRSQQSLVTLMVETLITMNTSRNDLTTIEKNIQIVGNYIRDAGLASFFNTIRYGIETRMAALTLSTLRPDINRLKALMELYLSKGPRAPFICILRDPIHGEFAPGNYPAIWSYAMGVAVVQNRAMQQYVTGRSYLDIDMFQLGQAVARDAEAQMSSTLEDELGVTHEAKESLKRHIRNINSSETSFHKPTGGSAIEMAIDEEPEQFEHRADQEQDGEPQSSIIQYAWAEGNRSDDRTEQATESDNIKTEQQNIRDRLNKRLNDKKKQGSQPSTNPTNRTNQDEIDDLFNAFGSN

SEQ ID NO: 76 - DNA, 1642 bp, Human parainfluenza virus 3
gaggattaaagacattgactagaaggtcaagaaaagggaactctataatttcaaaaatgttgagcctatttgatacatttaatgcacgtaggcaagaaaacataacaaaatcagctggtggagctatcattcctggacagaaaaatactgtctccatatttgcccttggaccgacaataactgatgacaatgagaaaatgacattagctcttctatttctatctcattcactagataatgagaaacaacatgcacaaagggcagggttcttggtgtctttattgtcaatggcttatgccaatccagagctttacctgacaacaaatggaagtaatgcagatgttaaatatgtcatatatatgattgagaaagatctaaaacggcaaaagtatggaggatttgtggttaagacgagagagatgatatatgaaaagacaactgagtggatatttggaagtgacctggattatgaccaggaaactatgctgcagaacggcagaaacaattcaacgattgaagatcttgttcacacatttgggtatccatcatgtttaggagctcttataatacagatctggatagttttggtcaaagccatcactagcatctcagggttaagaaaaggctttttcactcgattagaggctttcagacaagatggaacagtgcaagcagggctggtattgagcggtgacacagtggatcagattgggtcaatcatgcggtctcaacagagcttggtaactcttatggttgagacattaataacaatgaatactagcagaaatgacctcacaaccatagaaaagaatatacaaattgttggtaactacataagagatgcaggtcttgcttcattcttcaatacaatcaggtatggaattgagactagaatggcagctttgactctatctactctcagaccagatatcaatagattaaaagctctgatggaattgtatttatcaaagggaccacgcgctccttttatctgtatcctcagagatcctatacatggtgagttcgcaccaggcaactatcctgccatatggagttatgcaatgggggtggcagttgtacaaaacagagccatgcaacagtatgtgacgggaagatcatatctagatattgatatgttccagctgggacaagcagtagcacgtgatgctgaagctcagatgagctcaacactggaagatgaacttggagtgacacacgaagccaaagaaagcttgaaaagacatataaggaacataaacagttcagagacatctttccacaaaccaacaggcggatcagccatagagatggcaatagatgaagagccagaacaatttgaacacagagcagatcaagaacaagatggagaacctcaatcatctataatccaatatgcttgggcagaaggaaacagaagtgatgatcggaccgagcaagctacagaatccgacaatatcaagactgaacaacaaaacatcagagacagactaaacaagagactcaacgacaagaagaaacaaggcagtcaaccatccaccaatcccacaaacagaacgaaccaggacgaaatagacgatctgttcaatgcatttggaagcaactaactgagtcaacattttgatctaaatcaataataaataag

SEQ ID NO: 77 - protein, 539 aa, Human parainfluenza virus 3
MPTSILLIITTMIMASFCQIDITKLQHVGVLVNSSKGMKISQNFETRYLILSLIPKIEDSNSCGDQQIKQYKRLLDRLIIPLYDGLRLQKDVIVSNQESNENTDPRTKRFFGGVIGTIALGVATSAQITAAVALVEAKQARSDIEKLKEAIRDTNKAVQSVQSSIGNLIVAIKSVQDYVNKEIVPSIARLGCEAAGLQLGIALTQHYSELTNIFGDNIGSLQEKGIKLQGIASLYRTNITEIFTTSTVDKYDIYDLLFTESIKVRVIDVDLNDYSIALQVRLPLLTRLLNTQIYRVDSISYNIQNREWYIPLPSHIMTKGAFLGGADVKECIEAFSSYICPSDPGFVLNHEMESCLSGNISQCPRTVVKSDIVPRYAFVNGGVVANCITTTCTCNGIGNRINQPPDQGVKIITHKECNTIGINGMLFNTNKEGTLAFYTPNDITLNNSVALDPIDISIELNKAKSDLEESKEWIRRSNQKLDSIGNWHQSSTTIIIVLIMIIILFIINVTIIIIAVKYYRIQKRNRVDQNDKPYVLTNK

SEQ ID NO: 78 - DNA, 1845 bp, Human parainfluenza virus 3
aggacaaaagaagtcaataccaacaactattagcagccacactcgctggaacaagaaagaagggataaaaaaagtttaacagaagaaacaaaaacaaaaagcacagaacaccagaacaacaagatcaaaacacccaacccactcaaaacgaaaatctcaaaagagattggcaacacaacaaacactgaacatcatgccaacctcaatactgctaattattacaaccatgattatggcatctttctgccaaatagatatcacaaaactacagcatgtaggtgtattggttaacagttccaaagggatgaagatatcacaaaactttgaaacaagatatctaattttgagcctcataccaaaaatagaagattctaactcttgtggtgaccaacagatcaagcaatacaagaggttattggatagactgatcattcctttatatgatggattaagattacagaaggatgtgatagtgtccaatcaagaatccaatgaaaacactgaccccagaacaaaacgattctttggaggggtaattggaactattgctctgggagtggcaacctcagcacaaattacagcggcagttgctctggttgaagccaagcaggcaagatcagacattgaaaaactcaaggaagcaatcagggacacaaacaaagcagtgcagtcagtccagagctccataggaaatttgatagtagcaattaaatcggtccaggattatgtcaacaaagaaatcgtgccatcaattgcgagattaggttgtgaagcagcaggacttcagttaggaattgcattaacacagcattactcagaattaacaaacatattcggtgataacataggatcgttacaagaaaaagggataaaattacaaggtatagcatcattataccgcacaaatatcacagagatattcacaacatcaacagttgataaatatgatatttatgatctattatttacagaatcaataaaggtgagagttatagatgttgacttgaatgattactcgatcgccctccaagtcagactccctttattaactagactgctgaacacccagatttacagagtagattccatatcatataacatccaaaacagagaatggtatatccctcttcccagccacatcatgacaaaaggggcatttctaggtggagcagatgtcaaagaatgtatagaagcattcagcagttatatatgcccttctgatccaggatttgtactaaaccatgaaatggagagctgtttatcaggaaacatatcccaatgtccaagaaccgtggttaaatcagacattgttccaagatatgcatttgtcaatggaggagtggttgcaaattgtataacaaccacatgtacatgcaacggtatcggtaatagaatcaatcaaccacctgatcaaggagtaaaaattataacacataaagaatgtaatacaataggtatcaacggaatgctgttcaatacaaataaagaaggaactcttgcattttacacaccaaatgatataacattaaacaattctgttgcacttgatccaattgacatatcaatcgagctcaataaggccaaatcagatctagaagagtcaaaagaatggataagaaggtcaaatcaaaaactagattccattggaaattggcatcaatctagcaccacaatcataattgttttgataatgataattatattgtttataattaatgtaacgataattataattgcagttaagtattacagaattcaaaagagaaatcgagtggatcaaaatgataaaccatatgtattaacaaacaaatgacagatctatagatcattagatattaaaattat

SEQ ID NO: 79 - protein, 539 aa, Guinea pig parainfluenza virus TS-9
MPISILLIITTMIMASFCQIDITKLHHVGVLVNSPKGMKISQNFETRYLILSLIPKIEDSNSCGDQQIRQYKKLLDRLIIPLYDGLRLQKDVIVTNQESNENTDPRTKRFFGGVIGTIALGVATSAQITAAVALVEAKQARSDIEKLKEAIRDTNKAVQSVQSSIGNLIVAIKSVQDYVNKEIVPSIARLGCEAAGLQLGIALTQHYSELTNIFGDNIGSLQEKGIKLQGIASLYRTNITEIFTTSTVDKYDIYDLLFTESIKVRVIDVDLNDYSITLQVRLPLLTRLLNTQIYKVDSISYNIQNREWYIPLPSHIMTKGAFLGGADVKECIEAFSSYICPSDPGFVLNHEIESCLSGNISQCPRTTVTSDIVPRYAFVNGGVVANCITTTCTCNGIGNRINQPPDQGIKIITHKECSTIGINGMLFNTNKEGTLAFYTPNDITLNNSVALDPIDISIELNKAKSDLKESKEWIRRSNQKLDSIGNWHQSSTTIIIILIMIIILFIINVTIITIAIKYYRIQKRNRVDQNDEPYVLTNK

SEQ ID NO: 80 - DNA, 1851 bp, Guinea pig parainfluenza virus TS-9
aggacaaaagaggtcaataccaacaactattagcagtcatactcacaagaataagaaagaagggatttaaaaagttaaataggagaaataaaaacaaaaagtacagaacaccagagcgataaaatcaaaacatctaactcactcaaaacaaaaattccaaaagagaccggtaatacaacaagcattgagcacaatgccaatttcaatactgctgattattacaaccatgatcatggcatccttctgtcaaatagatatcacaaaactacatcatgtaggtgtattggtcaatagtcccaaagggatgaagatatcacaaaactttgaaacaagatatctgattttgagcctcataccaaaaatagaagactctaactcttgtggtgaccaacagatcaggcaatacaagaagctattggatagactgatcatccctttatatgatggattaagattacagaaagatgtgatagtaactaatcaagaatccaatgaaaacactgatcctagaacaaaacgattctttggaggggtaattggaactattgctctgggagtagcaacctcagcacaaattacagcagcagttgctttggtcgaagccaagcaggcaagatcagacatcgaaaaacttaaagaagcaattagggacacaaataaagcagtgcagtcagttcagagctccataggaaatctaatagtagcaattaaatcagtccaggattatgttaacaaagaaatcgtgccatcgattgcaaggctaggttgtgaagcagcaggacttcaattaggaattgcattaacacagcattactcagaattaacaaacatatttggtgataacataggatcgttacaagaaaaaggaataaaattacaaggtatagcatcattataccgcacaaacatcacagaaatattcacaacatcaacagttgataaatatgatatttatgatctgttatttacagaatcaataaaggtgagagttatagatgttgacttgaatgattactcaatcaccctccaagtcagactccctttattaactagattgctgaacactcagatctacaaagtagattccatatcatacaacatccaaaacagagaatggtatatccctcttcccagccacatcatgacgaaaggggcatttctaggtggagcagatgtcaaagaatgcatagaagcattcagcagctatatatgcccttctgatccaggatttgtattaaaccatgaaatagagagctgcttatcaggaaatatatctcaatgtccaagaaccacagtcacatcagacattgttccaagatatgcatttgtcaatggaggagtggttgcaaactgtataacaaccacttgtacatgcaacggaatcggtaatagaatcaatcaaccacctgatcaaggaataaaaattataacacataaagaatgtagtacaataggtatcaacggaatgctgttcaatacaaataaagaaggaactcttgcattctacacaccaaatgatataacactaaacaattctgttgcacttgatccaattgacatatcaatcgagctcaacaaggccaaatcagatctaaaagaatcaaaagaatggataagaaggtcaaatcaaaaactagattccattggaaattggcatcaatctagcactacaatcataattattttgataatgatcattatattatttataattaatgtaacgataattacaattgcaattaagtattacagaattcaaaagagaaatcgagtggatcaaaatgatgagccatatgtactaacaaacaaataacatatctacagatcattagatattaaaattataaaaaa

SEQ ID NO: 81 - protein, 353 aa, Human parainfluenza virus 3
MSITNSAIYTFPESSFSENGHIEPLPLKVNEQRKAVPHIRVAKIGNPPKHGSRYLDVFLLGFFEMERIKDKYGSVNDLDNDPGYKVCGSGSLPIGLVKYTGNIQELLQAATKLDIEVRRTVKAKEMIVYTVQNIKPELYPWSSRLRKGMLFDANKVALAPQCLPLDRSIKFRVIFVNCTAIGSITLFKIPKSMASLSLPSTISINLQVHIKTGVQTDSKGIVQILDEKGEKSLNFMVHLGLIKRKVGRMYSVEYCKQKIEKMRLIFSLGSVGGISLHVNATGSISKTLASQLVFKREICYPLMDLNPHLNLVIWASSVEITRVDAIFQPSLPGEFRYYPNIIAKGVGKIKQWN

SEQ ID NO: 82 - DNA, 1150 bp, Human parainfluenza virus 3
aggattaaagaataaattaatccttgtccaaaatgagtataactaactctgcaatatacacattcccggagtcatcattctctgagaatggtcatatagaaccattaccactcaaagtcaatgaacagagaaaagcagtacctcacattagagttgccaaaatcggaaatccaccaaaacatggatcccggtatttggatgtcttcttactcggcttcttcgagatggaacgaatcaaagacaaatacgggagtgtgaatgatcttgacaatgacccgggttacaaagtttgtggctctggatcattaccaatcggattagttaaatacactgggaatatccaggaattattacaggcagcaactaaactggacatagaagtgagaagaacagtcaaagcgaaagaaatgattgtttatacggtacaaaatataaaaccagaactgtacccatggtccagtagactaagaaaaggaatgttgttcgatgccaacaaagttgctcttgctcctcaatgtcttccactagataggagcataaaattcagagtaatcttcgttaattgtacggcaattggatcaataaccttgtttaaaattcccaagtcaatggcatcactatctctacccagcacaatatcaatcaatctgcaggtacacatcaaaacaggggttcagactgattctaaagggatagttcaaattttggatgagaagggtgaaaaatcactgaatttcatggtccatctcggattgatcaaaagaaaagtaggcagaatgtactctgtcgagtactgtaaacagaaaatcgagaaaatgagattgatattttctttgggatcagttggaggaatcagtcttcatgtcaatgcaactggatctatatcaaaaacactagcaagtcagctggtattcaaaagggagatttgttatcccttaatggatctaaatccacatctcaatctagttatctgggcttcatcagtagagattacaagagtggatgcaattttccaaccttctttacctggcgagttcagatactatcctaacattattgcaaaaggagttgggaaaatcaaacaatggaactagtaatctctattttgatctggatatatctattaagccaaagcaaataagagataatc

SEQ ID NO: 83 - protein, 572 aa, Human parainfluenza virus 3
MEYWKHTNHGKDAGNEPETSTATNGNKLTNKITYILWTITLMLLSIIFIIVLINSIKSEKARESLLQDINNEFMEVTEKIQVASDNTNDLIQSGVNTRLLTIQSHVQNYIPISLTQQISDLRKFISEITIRNDNQEVPPQRITHDVGIKPLNPDDFWRCTSGLPSLMKTPKIRLMPGPGLLAMPTTVDGCVRTPSLVINDLIYAYTSNLITRGCQDIGKSYQVLQIGIITVNSDLVPDLNPRISHTFNINDNRKSCSLALLNTDVYQLCSTPKVDERSDYASSGIEDIVLDIVNYDSSISTTRFKNNNISFDQPYAALYPSVGPGIYYKGKIIFLGYGGLEHPINENAICNTTGCPGKTQRDCNQASHSPWFSDRRMVNSIIVVDKGLNSVPKLKVWTISMRQNYWGSEGRLLLLGNKIYIYTRSTSWHSKLQLGIIDITDYSDIRIKWTWHNVLSRPGNNECPWGHSCPDGCITGVYTDAYPLNPTGSIVSSVILDSQKSRVSPVITYSTATERVNELAIRNKTLSAGYTATSCITHYNKGYCFHIVEINHKSLITFQPMLFKTEIPKSCS

SEQ ID NO: 84 - DNA, 1719 bp, Human parainfluenza virus 3
atggaatactggaagcacaccaatcacggaaaggatgctggtaatgagccggagacatccacagccactaatggcaacaagctcaccaacaagataacatatatattatggacgataaccctgatgttattatcaataatcttcatcatagtgctaattaattccatcaaaagtgaaaaggcccgcgaatcattgctacaagacataaataatgagtttatggaagttacagaaaagatccaagtggcatcggataatactaatgatctaatacaatcaggagtaaatacaaggcttcttacaattcagagtcatgtccagaattatataccaatatcattgacacaacaaatatcggatcttaggaaattcattagtgaaattacaattagaaatgataatcaagaagtgccaccacaaagaataacacatgatgtgggtataaaacctttaaatccagatgatttctggagatgcacatctggtcttccatctttgatgaaaactccaaaaataagattaatgccggggccaggattattagctatgccaacgactgttgatggctgtgtcagaactccgtccttagtgataaatgatctgatttatgcttacacctcaaatctaatcactcgaggttgccaagatatagggaaatcatatcaagtgttacagatagggataataactgtaaactcagacttggtacctgacttaaatcccaggatctctcataccttcaacataaatgacaatagaaagtcatgttctctagcactcctaaacacagatgtatatcaactgtgttcaactcccaaagttgatgaaagatcagattatgcatcatcaggcatagaagatattgtacttgatattgtcaattatgatagctcaatctcaacaacaagatttaagaataataatataagttttgaccaaccatatgcggcattatacccatctgttggaccagggatatactacaaaggcaaaataatatttcttgggtatggaggtcttgaacatccaataaatgagaatgcaatctgcaacacaactgggtgtcctgggaaaacacagagagactgcaatcaagcatctcatagtccatggttttcagatagaaggatggtcaactctatcattgttgttgacaagggtttaaactcagttccaaaattgaaggtatggacgatatcgatgagacaaaattactgggggtcagaaggaagattacttctactaggtaacaagatctacatatacacaagatctacaagttggcacagcaagttacaattaggaataattgacattactgactacagtgatataaggataaaatggacatggcataatgtgctatcaagaccaggaaacaatgaatgtccatggggacattcatgtccggatggatgtataacaggagtatatactgatgcatatccactcaatcccacaggaagcattgtatcatctgtcatattagactcacaaaaatcgagagtcagcccagtcataacttactcaacagcaaccgaaagggtaaacgagctggccatccgaaacaaaacactctcagctgggtatacagcaacaagctgcattacacactataacaaaggatattgttttcatatagtagaaataaatcataaaagcttaatcacatttcaacctatgttgttcaaaacagagattccaaaaagctgcagttaa

SEQ ID NO: 85 - protein, 572 aa, Human parainfluenza virus 3
MEYWKHTNHGKDVGNELETSTATHGNKLTNKITYILWTITLVLLSIVFIIVLTNSIKSEKARESLLQDINNEFMEVTEKIQVASDNTNDLIQSGVNTRLLTIQSHVQNYIPISLTQQISDLRKFISEITIRNDNQEVPPQRITHDVGIKPLNPDDFWRCTSGLPSLMKTPKIRLMPGPGLLAMPTTVDGCVRTPSLVINDLIYAYTSNLITRGCQDIGKSYQVLQIGIITVNSDLVPDLNPRISHTFNINDNRKSCSLALLNTDVYQLCSTPKVDERSDYASSGIEDLVLDIVNYDGSISTTRFKNNNISFDQPYAALYPSVGPGIYYKGKIIFLGYGGLEHPINENAICNTTECPGKTQRDCNQASHSPWFSDRRMVNSIIVVDKGLNSVPKLKVWSISMRQNYWGSEGRLLLLGNKIYIYTRSTSWHSKLQLGIIDITDYSDIRIKWTWHNVLSRPGNNECPWGHSCPDGCITGVYTDAYPLNPTGSIVSSVILDSQKSRVNPVITYSTATERVNELAIRNETLSAGYTTTSCITHYNKGYCFHIVEINHKSLNTFQPMLFKTEIPKSCS

SEQ ID NO: 86 - DNA, 1719 bp, Human parainfluenza virus 3
atggaatactggaagcacaccaaccacggaaaggatgttggtaatgagctggaaacatccacagccactcatggcaacaagctcaccaacaagataacatatatattatggacgataaccctggtgttattatcaatagtcttcatcatagtgctaactaattccatcaaaagtgaaaaggcccgcgaatcattgctacaagacataaataatgagtttatggaagttacagaaaagatccaagtggcatctgataatactaatgatctaatacagtcaggagtgaatacaaggcttcttacaattcagagtcatgtccagaattatataccaatatcattgacacaacaaatatcggatcttaggaaattcattagtgaaattacaattagaaatgataatcaagaagtgccaccacaaagaataacacatgatgtaggtataaaacctttaaatccagatgatttctggagatgcacgtctggtcttccatctttaatgaaaactccaaaaataagattaatgccgggcccaggattattagctatgccaacgactgttgatggctgtgtcagaaccccgtccttagtgataaatgatctgatttatgcttacacctcaaatctaattactcgaggttgccaggatatagggaaatcatatcaagtattacagatagggataataactgtaaactcagacttggtacctgacttaaatcctaggatctctcataccttcaacataaatgacaatagaaagtcatgttctctagcactcctaaatacagatgtatatcaactgtgttcaactccaaaagttgatgaaagatcagattatgcatcatcaggcatagaagatcttgtacttgatattgtcaattatgatggctcaatctcaacaacaagatttaagaataataatataagttttgatcaaccatatgcggcattatacccatctgttggaccagggatatactacaaaggcaaaataatatttctcgggtatggaggtcttgaacatccaataaatgagaatgcaatctgcaacacaactgagtgtcctgggaaaacacagagagactgcaatcaggcatctcacagtccatggttttcagatagaaggatggtcaactctataattgttgttgacaagggtttaaactcagttccaaaattgaaggtatggtcgatatctatgagacaaaattactgggggtcagaaggaagattacttctactaggtaacaagatctacatatacacaagatctacaagttggcacagcaagttacaattaggaataattgacattactgactacagtgatataaggataaaatggacatggcataatgtgctatcaagaccaggaaacaatgaatgtccatggggacattcatgtccggatggatgtataacgggagtatatactgatgcatatccactcaatcccacaggaagcattgtatcatctgtcatattggactcacaaaaatcgagagtcaacccagtcataacttactcaacagcaaccgaaagggtaaacgagctggccatccgaaacgaaacactctcagctgggtatacaacaacaagttgcattacacactataacaaagggtattgttttcatatagtagaaataaatcataaaagcttaaacacatttcaacccatgttgttcaaaacagagattccaaaaagctgcagttaa

SEQ ID NO: 87 - protein, 572 aa, Human parainfluenza virus 3
MEYWKHTNHGKDAGNELETSMATNGNKLTNKITYILWTIILVLLSIVFIIVLINSIKSEKAHESLLQDINNEFMEITEKIQMASDNTNDLIQSGVNTRLLTIQSHVQNYIPISLTQQMSDLRKFISEITIRNDNQEVLPQRITHDVGIKPLNPDDFWRCTSGLPSLMKTPKIRLMPGPGLLAMPTTVDGCIRTPSLVINDLIYAYTSNLITRGCQDIGKSYQVLQIGIITVNSDLVPDLNPRISHTFNINDNRKSCSLALLNTDVYQLCSTPKVDERSDYASSGIEDIVLDIVNYDGSISTTRFKNNNISFDQPYAALYPSVGPGIYYKGKIIFLGYGGLEHPINENVICNTTGCPGKTQRDCNQASHSPWFSDRRMVNSIIVVDKGLNSIPKLKVWTISMRQNYWGSEGRLLLLGNKIYIYTRSTSWHSKLQLGIIDITDYSDIRIKWTWHNVLSRPGNNECPWGHSCPDGCITGVYTDAYPLNPTGSIVSSVILDSQKSRVNPVITYSTATERVNELAIRNRTLSAGYTTTSCITHYNKGYCFHIVEINQKSLNTLQPMLFKTEVPKSCS

SEQ ID NO: 88 - DNA, 1832 bp, Human parainfluenza virus 3
gacaaatccaaattcgagatggaatactggaagcataccaatcacggaaaggatgctggcaatgagctggagacgtccatggctactaatggcaacaagctcaccaataagataacatatatattatggacaataatcctggtgttattatcaatagtcttcatcatagtgctaattaattccatcaaaagtgaaaaggctcatgaatcattgctgcaagacataaataatgagtttatggaaattacagaaaagatccaaatggcatcggataataccaatgatctaatacagtcaggagtgaatacaaggcttcttacaattcagagtcatgtccagaattatataccaatatcactgacacaacagatgtcagatcttaggaaattcattagtgaaattacaattagaaatgataatcaagaagtgctgccacaaagaataacacatgatgtgggtataaaacctttaaatccagatgatttttggagatgcacgtctggtcttccatctttaatgaaaactccaaaaataaggttaatgccagggccgggattattagctatgccaacgactgttgatggctgtatcagaactccgtccttagttataaatgatctgatttatgcttatacctcaaatctaattactcgaggttgtcaggatataggaaaatcatatcaagtcttacagatagggataataactgtaaactcagacttggtacctgacttaaatcccaggatctctcatacttttaacataaatgacaataggaagtcatgttctctagcactcctaaatacagatgtatatcaactgtgttcaactcccaaagttgatgaaagatcagattatgcatcatcaggcatagaagatattgtacttgatattgtcaattatgatggctcaatctcaacaacaagatttaagaataataacataagctttgatcaaccttatgctgcactatacccatctgttggaccagggatatactacaaaggcaaaataatatttctcgggtatggaggtcttgaacatccaataaatgagaatgtaatctgcaacacaactgggtgtcccgggaaaacacagagagactgcaatcaggcatctcatagtccatggttttcagataggaggatggtcaactctatcattgttgttgacaaaggcttaaactcaattccaaaattgaaggtatggacgatatctatgagacagaattactgggggtcagaaggaaggttacttctactaggtaacaagatctatatatatacaagatccacaagttggcatagcaagttacaattaggaataattgatattactgattacagtgatataaggataaaatggacatggcataatgtgctatcaagaccaggaaacaatgaatgtccatggggacattcatgtccagatggatgtataacaggagtatatactgatgcatatccactcaatcccacagggagcattgtgtcatctgtcatattagattcacaaaaatcgagagtgaacccagtcataacttactcaacagcaaccgaaagagtaaacgagctggccatccgaaacagaacactctcagctggatatacaacaacaagctgcatcacacactataacaaaggatattgttttcatatagtagaaataaatcagaaaagcttaaacacacttcaacccatgttgttcaagacagaggttccaaaaagctgcagttaatcataattaaccgcaatatgcattaacctatctataatacaagtatatgataagtaatcagcaatcagacaatagacaaaagggaaatataaaaa

SEQ ID NO: 89 - DNA, 12 bp, Artificial Sequence
  Synthetic
gacgacgacaag

SEQ ID NO: 90 - DNA, 14 bp, Artificial Sequence
  Synthetic
gaggagaagcccgg

SEQ ID NO: 91 - protein, 6 aa, Artificial Sequence
  Synthetic
HHHHHH

SEQ ID NO: 92 - protein, 10 aa, Artificial Sequence
  Synthetic
EQKLISEEDL

SEQ ID NO: 93 - protein, 8 aa, Artificial Sequence
  Synthetic
DYKDDDDK

SEQ ID NO: 94 - protein, 8 aa, Artificial Sequence
  Synthetic
WSHPQFEK

SEQ ID NO: 95 - protein, 9 aa, Artificial Sequence
  Synthetic
YPYDVPDYA

SEQ ID NO: 96 - DNA, 15 bp, Artificial Sequence
  Synthetic
gacgacgacaagatg

SEQ ID NO: 97 - DNA, 17 bp, Artificial Sequence
  Synthetic
taaccgggcttctcctc

SEQ ID NO: 98 - DNA, 17 bp, Artificial Sequence
  Synthetic
gaggagaagcccggtta

SEQ ID NO: 99 - DNA, 15 bp, Artificial Sequence
  Synthetic
catcttgtcgtcgtc

SEQ ID NO: 100 - DNA, 15 bp, Artificial Sequence
  Synthetic
ccgggcttctcctca

SEQ ID NO: 101 - DNA, 16 bp, Artificial Sequence
  Synthetic
tcttgtcgtcgtcatc

SEQ ID NO: 102 - DNA, 18 bp, Artificial Sequence
  Synthetic
  CDS (1)..(18)
gatgacgacgacaagatg

SEQ ID NO: 103 - protein, 6 aa, Artificial Sequence
  Synthetic Construct
DDDDKM

SEQ ID NO: 104 - DNA, 18 bp, Artificial Sequence
  Synthetic
taaccgggcttctcctca

SEQ ID NO: 105 - DNA, 18 bp, Artificial Sequence
  Synthetic
tgaggagaagcccggtta

SEQ ID NO: 106 - DNA, 18 bp, Artificial Sequence
  Synthetic
catcttgtcgtcgtcatc

SEQ ID NO: 107-113 - skipped (7 entries)

SEQ ID NO: 114 - protein, 469 aa, Influenza virus
MNPNQKIITIGSVSLTISTICFFMQIAILITTVTLHFKQYEFNSPPNNQVMLCEPTIIERNITEIVYLTNTTIEKEICPKLAEYRNWSKPQCNITGFAPFSKDNSIRLSAGGDIWVTREPYVSCDPDKCYQFALGQGTTLNNVHSNDTVHDRTPYRTLLMNELGVPFHLGTKQVCIAWSSSSCHDGKAWLHVCVTGDDENATASFIYNGRLVDSIVSWSKKILRTQESECVCINGTCTVVMTDGSASGKADTKILFIEEGKIVHTSTLSGSAQHVEECSCYPRYPGVRCVCRDNWKGSNRPIVDINIKDYSIVSSYVCSGLVGDTPRKNDSSSSSHCLDPNNEEGGHGVKGWAFDDGNDVWMGRTISEKLRSGYETFKVIEGWSNPNSKLQINRQVIVDRGNRSGYSGIFSVEGKSCINRCFYVELIRGRKQETEVLWTSNSIVVFCGTSGTYGTGSWPDGADINLMPI

SEQ ID NO: 115 - protein, 219 aa, canine distemper virus
MEVKVENIRAIDMLKARVKNRVARSKCFKNASLILIGITTLSIALNIYLIINYTIQKTSSESEHHTSSPPTESNKEASTISTDNPDINPNSQHPTQQSTENPTLNPAASVSPSETEPASTPDTTNRLSSVDRSTAQPSESRTKTKPTVHTRNNPSTASSTQSPPRATTKAIRRATTFRMSSTGKRPTTTSVQSDSSTTTQNHEETGSANPQASVSTMQN

SEQ ID NO: 116 - protein, 264 aa, Avian Metapneumovirus
MEVKVENVGKSQELKVKVKNFIKRSDCKKKLFALILGLVSFELTMNIMLSVMYVESNEALSLCRIQGTPAPRDNKTNTENATKETTLHTTTTTRDPEVRETKTTKPQANEGATNPSRNLTTKGDKHQTTRATTEAELEKQSKQTTEPGTSTQKHTPARPSSKSPTTTQATAQPTTPTAPKASTAPKNRQATTKKTETDTTTASRARNTNNPTETATTTPKATTETGKGKEGPTQHTTKEQPETTARETTTPQPRRTAGASPRAS

SEQ ID NO: 117 - protein, 219 aa, Human Metapneumovirus; identical to SEQ ID NO: 115

SEQ ID NO: 118 - protein, 299 aa, Human Respiratory Syncytial Virus
MSKHKNQRTARTLEKTWDTLNHLIVISSCLYRLNLKSIAQIALSVLAMIISTSLIIAAIIFIISANHKVTLTTVTVQTIKNHTEKNITTYLTQVPPERVSSSKQPTTTSPIHTNSATTSPNTKSETHHTTAQTKGRTTTSTQTNKPSTKPRLKNPPKKPKDDYHFEVFNFVPCSICGNNQLCKSICKTIPSNKPKKKPTIKPTNKPTTKTTNKRDPKTPAKTTKKETTTNPTKKPTLTTTERDTSTSQSTVLDTTTLEHTIQQQSLHSTTPENTPNSTQTPTASEPSTSNSTQNTQSHA

SEQ ID NO: 119 - protein, 465 aa, Influenza B virus
MLPSTIQTLTLFLTSGGVLLSLYVSALLSYLLYSDILLKFSPKIIAPTTSLDCANASNVQAVNHSATKEMKFLPPEPEWTYPRLSCQGSTFQKALLISPHRFGEAKGNSAPLIIREPFIACGPKECKHFALTHYAAQPGGYYNGTREDRNKLRHLISVNLGKIPTVENSIFHMAAWSGSACHDGREWTYIGVDGPDSNALIKIKYGEAYTDTYHSYANNILRTQESACNCIGGDCYLMITDGSASGISKCRFLKIREGRIIKEIFPTGRVEHTEECTCGFASNKTIECACRDNSYTAKRPFVKLNVETDTAEIRLMCTETYLDTPRPDDGSITGPCESNGDKGSGGVKGGFVHQRMASKIGRWYSRTMSKTKRMGMELYVKYDGDPWTDSDALAPSGVMVSMEEPGWYSFGFEIKDKKCDVPCIGIEMVHDGGKRTWHSAATAIYCLMGSGQLLWDTVTGVNMAL

SEQ ID NO: 120 - protein, 449 aa, Influenza virus
MNPNQKIITIGSICMVIGIVSLMLQIGNMISIWVSHSIQTGNQHQAEPISNTNFLTEKAVASVTLAGNSSLCPISGWAVHSKDNSIRIGSKGDVFVIREPFISCSHLECRTFFLTQGALLNDKHSNGTVKDRSPHRTLMSCPVGEAPSPYNSRFESVAWSASACHDGTSWLTIGISGPDNGAVAVLKYNGIITDTIKSWRNNILRTQESECACVNGSCFTVMTDGPSNGQASYKIFKMEKGKVVKSVELDAPNYHYEECSCYPDAGEITCVCRDNWHGSNRPWVSFNQNLEYQIGYICSGVFGDNPRPNDGTGSCGPVSPNGAYGVKGFSFKYGNGVWIGRTKSTNSRSGFEMIWDPNGWTGTDSSFSVKQDIVAITDWSGYSGSFVQHPELTGLDCIRPCFWVELIRGRPKESTIWTSGSSISFCGVNSDTVGWSWPDGAELPFTIDK

SEQ ID NO: 121 - protein, 467 aa, Influenza virus
MNPNQKIIALGSVSITIATICLLMQIAILATTMTLHFNECTNPSNNQAVPCEPIIIERNITEIVHLNNTTIEKESCPKVAEYKNWSKPQCQITGFAPFSKDNSIRLSAGGDIWVTREPYVSCGLGKCYQFALGQGTTLNNKHSNGTIHDRSPHRTLLMNELGVPFHLGTKQVCIAWSSSSCHDGKAWLHVCVTGDDRNATASIIYDGMLTDSIGSWSKNILRTQESECVCINGTCTVVMTDGSASGRADTKILFIREGKIVHIGPLSGSAQHVEECSCYPRYPEVRCVCRDNWKGSNRPVLYINVADYSVDSSYVCSGLVGDTPRNDDSSSSSNCRDPNNERGGPGVKGWAFDNGNDVWMGRTIKKDSRSGYETFRVVGGWTTANSKSQINRQVIVDSDNWSGYSGIFSVEGKTCINRCFYVELIRGRPQETRVWWTSNSIIVFCGTSGTYGTGSWPDGANINFMSI

SEQ ID NO: 122 - protein, 469 aa, Influenza virus
MNPNQKIITIGSVSLTIATICFLMQIAILVTTVTLHFKQYECNSPPNNQVMLCEPTIIERNITEIVYLTNTTIEKEICPKLAEYRNWSKPQCNITGFAPFSKDNSIRLSAGGDIWVTREPYVSCDPDKCYQFALGQGTTLNNGHSNDTVHDRTPYRTLLMNELGVPFHLGTKQVCIAWSSSSCHDGKAWLHVCVTGDDENATASFIYNGRLVDSIGSWSKKILRTQESECVCINGTCTVVMTDGSASGKADTKILFIEEGKIVHTSLLSGSAQHVEECSCYPRYPGVRCVCRDNWKGSNRPIVDINVKDYSIVSSYVCSGLVGDTPRKNDSSSSSHCLDPNNEEGGHGVKGWAFDDGNDVWMGRTISEKLRSGYETFKVIEGWSKPNSKLQINRQVIVDRGNRSGYSGIFSVEGKSCINRCFYVELIRGRKQETEVLWTSNSIVVFCGTSGTYGTGSWPDGADINLMPI

SEQ ID NO: 123 - protein, 469 aa, Influenza virus
MNPNQKIITIGVVNTTLSTIALLIGVGNLVFNTVIHEKIGNHQTVIHPTITTPAVPNCSDTIITYNNTVINNITTTIITEAERLFKPPLPLCPFRGFFPFHKDNAIRLGENKDVIVTREPYVSCDNDNCWSFALAQGALLGTKHSNGTIKDRTPYRSLIRFPIGTAPVLGNYKEICIAWSSSSCFDGKEWMHVCMTGNDNDASAQIIYAGRMTDSIKSWRKDILRTQESECQCIGGTCVVAVTDGPAANSADHRVYWIREGRIVKYENVPKTKIQHLEECSCYVDIDVYCICRDNWKGSNRPWMRINNETILETGYVCSKFHSDTPRPADPSTVSCDSPSNINGGPGVKGFGFKAGNDVWLGRTVSTSGRSGFEIIKVTDGWINSPNHAKSVTQTLVSNNDWSGYSGSFIVKTKGCFQPCFYVELIRGRPNKNDDVSWTSNSIVTFCGLDNEPGSGNWPDGSNIGFMPK

SEQ ID NO: 124 - protein, 617 aa, Measles virus
MSPQRDRINAFYKDNPHPKGSRIVINREHLMIDRPYVLLAVLFVMFLSLIGLLAIAGIRLHRAAIYTAENHKSLSTNLDVTNSIEHQVKDVLTPLFKIIGDEVGLRTPQRFTDLVKFISDKIKFLNPDREYDFRDLTWCINPPERIKLDYDQYCADVAAEELMNALVNSTLLEARATNQFLAVSKGNCSGPTTIRGQFSNMSLSLLDLYLSRGYNVSSIVTMTSQGMYGGTYLVEKPNLSSKGSELSQLSMHRVFEVGVIRNPGLGAPVFHMTNYFEQPVSNDFSNCMVALGELKFAALCHREDSITIPYQGSGKGVSFQLVKLGVWKSPTDMRSWVPLSTDDPVIDRLYLSSHRGVIADNQAKWAVPTTRTDDKLRMETCFQQACKGKNQALCENPEWAPLKDNRIPSYGVLSVNLSLTVELKIKIASGFGPLITHGSGMDLYKTNHNNVYWLTIPPMKNLALGVINTLEWIPRFKVSPNLFTVPIKEAGEDCHAPTYLPAEVDGDVKLSSNLVILPGQDLQYVLATYDTSRVEHAVVYYVYSPSRSFSYFYPFRLPIKGVPIELQVECFTWDKKLWCRHFCVLADSESGGHITHSGMVGMGVSCTVTREDGTNRR

SEQ ID NO: 125 - protein, 582 aa, Mumps virus
MEPSKLFIMSDNATFAPGPVVNAAGKKTFRTCFRILVLSVQAVTLILVIVTLGELIRMINDQGLSNQLSSITDKIRESAAMIASAVGVMNQVIHGVTVSLPLQIEGNQNQLLSTLATICTNRNQVSNCSTNIPLVNDLRFINGINKFIIEDYATHDFSIGHPLNMPSFIPTATSPNGCTRIPSFSLGKTHWCYTHNVINANCKDHTSSNQYVSMGILVQTASGYPMFKTLKIQYLSDGLNRKSCSIATVPDGCAMYCYVSTQLETDDYAGSSPPTQKLTLLFYNDTIKERTISPSGLEGNWATLVPGVGSGIYFENKLIFPAYGGVLPNSTLGVKSAREFFRPVNPYNPCSGPPQELDQRALRSYFPSYFSSRRVQSAFLVCAWNQILVTNCELVVPSNNQTLMGAEGRVLLINNRLLYYQRSTSWWPYELLYEISFTFTNSGQSSVNMSWIPIYSFTRPGLGKCSGENICPTVCVSGVYLDPWPLTPYSHQSGINRNFYFTGALLNSSTTRVNPTLYVSALNNLKVLAPYGTQGLFASYTTTTCFQDTGDASVYCVYIMELASNIVGEFQILPVLARLTIT

SEQ ID NO: 126 - protein, 602 aa, Nipah virus
MPAENKKVRFENTTSDKGKIPSKVIKSYYGTMDIKKINEGLLDSKILSAFNTVIALLGSIVIIVMNIMIIQNYTRSTDNQAVIKDALQGIQQQIKGLADKIGTEIGPKVSLIDTSSTITIPANIGLLGSKISQSTASINENVNEKCKFTLPPLKIHECNISCPNPLPFREYRPQTEGVSNLVGLPNNICLQKTSNQILKPKLISYTLPVVGQSGTCITDPLLAMDEGYFAYSHLERIGSCSRGVSKQRIIGVGEVLDRGDEVPSLFMTNVWTPPNPNTVYHCSAVYNNEFYYVLCAVSTVGDPILNSTYWSGSLMMTRLAVKPKSNGGGYNQHQLALRSIEKGRYDKVMPYGPSGIKQGDTLYFPAVGFLVRTEFKYNDSNCPITKCQYSKPENCRLSMGIRPNSHYILRSGLLKYNLSDGENPKVVFIEISDQRLSIGSPSKIYDSLGQPVFYQASFSWDTMIKFGDVLTVNPLVVNWRNNTVISRPGQSQCPRFNTCPEICWEGVYNDAFLIDRINWISAGVFLDSNQTAENPVFTVFKDNEILYRAQLASEDTNAQKTITNCFLLKNKIWCISLVEIYDTGDNVIRPKLFAVKIPEQCT

SEQ ID NO: 127 - protein, 571 aa, Parainfluenza virus
MEDYSNLSLKSIPKRTCRIIFRTATILGICTLIVLCSSILHEIIHLDVSSGLMDSDDSQQGIIQPIIESLKSLIALANQILYNVAIIIPLKIDSIETVIFSALKDMHTGSMSNTNCTPGNLLLHDAAYINGINKFLVLKSYNGTPKYGPLLNIPSFIPSATSPNGCTRIPSFSLIKTHWCYTHNVMLGDCLDFTTSNQYLAMGIIQQSAAAFPIFRTMKTIYLSDGINRKSCSVTAIPGGCVLYCYVATRSEKEDYATTDLAELRLAFYYYNDTFIERVISLPNTTGQWATINPAVGSGIYHLGFILFPVYGGLISGTPSYNKQSSRYFIPKHPNITCAGNSSEQAAAARSSYVIRYHSNRLIQSAVLICPLSDMHTARCNLVMFNNSQVMMGAEGRLYVIDNNLYYYQRSSSWWSASLFYRINTDFSKGIPPIIEAQWVPSYQVPRPGVMPCNATSFCPANCITGVYADVWPLNDPEPTSQNALNPNYRFAGAFLRNESNRTNPTFYTASASALLNTTGFNNTNHKAAYTSSTCFKNTGTQKIYCLIIIEMGSSLLGEFQIIPFLRELIP

SEQ ID NO: 128 - protein, 572 aa, Parainfluenza virus; identical to SEQ ID NO: 87

SEQ ID NO: 129 - protein, 575 aa, Parainfluenza virus
MAEKGKTNSSYWSTTRNDNSTVNTHINTPAGRTHIWLLIATTMHTVLSFIIMILCIDLIIKQDTCMKTNIMTVSSMNESAKIIKETITELIRQEVISRTINIQSSVQSGIPILLNKQSRDLTQLIEKSCNRQELAQICENTIAIHHADGISPLDPHDFWRCPVGEPLLSNNPNISLLPGPSLLSGSTTISGCVRLPSLSIGDAIYAYSSNLITQGCADIGKSYQVLQLGYISLNSDMYPDLNPVISHTYDINDNRKSCSVIAAGTRGYQLCSLPTVNETTDYSSEGIEDLVFDILDLKGKTKSHRYKNEDITFDHPFSAMYPSVGSGIKIENTLIFLGYGGLTTPLQGDTKCVINRCTNVNQSVCNDALKITWLKKRQVVNVLIRINNYLSDRPKIVVETIPITQNYLGAEGRLLKLGKKIYIYTRSSGWHSNLQIGSLDINNPMTIKWAPHEVLSRPGNQDCNWYNRCPRECISGVYTDAYPLSPDAVNVATTTLYANTSRVNPTIMYSNTSEIINMLRLKNVQLEAAYTTTSCITHFGKGYCFHIVEINQASLNTLQPMLFKTSIPKICKITS

SEQ ID NO: 130 - protein, 315 aa, respiratory syncytial virus
MSKNKNQRTARTLEKTWDTLNHLIVISSCLYKLNLKSIAQIALSVLAMIISTSLIIAAIIFIISANHKVTLTTVTVQTIKNHTEKNITTYLTQVSPERVSPSKQPTTTPPIHTNSATISPNTKSETHHTTAQTKGRTTTPTQNNKPSTKPRPKNPPKKPKDDYHFEVFNFVPCSICGNNQLCKSICKTIPSNKPKKKPTIKPTNKPPTKTTNKRDSKTLAKTLKKETTINPTKKPTPKTTERDTSTLQSIVLDTTTSKHTERDTSTSQSIVLDTTTSKHTIQQQSLHSTTPENTPNSTQTPTASEPSTSNSNQKL

SEQ ID NO: 131 - protein, 351 aa, Vaccinia virus
MTMKMMVHIYFVSLLLLLFHSYAIDIENEITEFFNKMRDTLPAKDSKWLNPACMFGGTMNDIAALGEPFSAKCPPIEDSLLSHRYKDYVVKWERLEKNRRRQVSNKRVKHGDLWIANYTSKFSNRRYLCTVTTKNGDCVQGIVRSHIKKPPSCIPKTYELGTHDKYGIDLYCGILYAKHYNNITWYKDNKEINIDDIKYSQTGKKLIIHNPELEDSGRYNCYVHYDDVRIKNDIVVSRCKILTVIPSQDHRFKLILDPKINVTIGEPANITCTAVSTSLLIDDVLIEWENPSGWLIGFDFDVYSVLTSRGGITEATLYFENVTEEYIGNTYKCRGHNYYFEKTLTTTVVLE

SEQ ID NO: 132 - DNA, 1410 bp, Influenza virus
atgaatccaaatcaaaagataataacgattggctctgtttctctcaccatttccacaatatgcttcttcatgcaaattgccatcctgataactactgtaacattgcatttcaagcaatatgaattcaactcccccccaaacaaccaagtgatgctgtgtgaaccaacaataatagaaagaaacataacagagatagtgtatctgaccaacaccaccatagagaaggaaatatgccccaaactagcagaatacagaaattggtcaaagccgcaatgtaacattacaggatttgcacctttttctaaggacaattcgattcggctttccgctggtggggacatctgggtgacaagagaaccttatgtgtcatgcgatcctgacaagtgttatcaatttgcccttggacagggaacaacactaaacaacgtgcattcaaatgacacagtacatgataggaccccttatcggaccctattgatgaatgagttgggtgttccatttcatctggggaccaagcaagtgtgcatagcatggtccagctcaagttgtcacgatggaaaggcatggctgcatgtttgtgtaacgggggatgatgaaaatgcaactgctagcttcatttacaatgggaggcttgtagatagtattgtttcatggtccaaaaaaatcctcaggacccaggagtcagaatgcgtttgtatcaatggaacttgtacagtagtaatgactgatgggagtgcttcaggaaaagctgatactaaaatactattcattgaggaggggaaaatcgttcatactagcacattgtcaggaagtgctcagcatgtcgaggagtgctcctgttatcctcgatatcctggtgtcagatgtgtctgcagagacaactggaaaggctccaataggcccatcgtagatataaacataaaggattatagcattgtttccagttatgtgtgctcaggacttgttggagacacacccagaaaaaacgacagctccagcagtagccattgcttggatccaaacaatgaggaaggtggtcatggagtgaaaggctgggcctttgatgatggaaatgacgtgtggatgggaagaacgatcagcgagaagttacgctcaggatatgaaaccttcaaagtcattgaaggctggtccaaccctaactccaaattgcagataaataggcaagtcatagttgacagaggtaataggtccggttattctggtattttctctgttgaaggcaaaagctgcatcaatcggtgcttttatgtggagttgataaggggaagaaaacaagaaactgaagtcttgtggacctcaaacagtattgttgtgttttgtggcacctcaggtacatatggaacaggctcatggcctgatggggcggacatcaatctcatgcctatataa

SEQ ID NO: 133 - DNA, 799 bp, Avian Metapneumovirus
atggaggtcaaggtagagaatgttggcaagtcacaggagcttaaagttaaagtcaagaattttataaaaaggtctgattgcaagaaaaaactttttgccttgattttagggctagtcagctttgaactcactatgaatataatgctgtctgtcatgtatgtggagtcaaatgaggccctaagtttatgtaggatccaagggactcctgctccaagagataataagacaaacacagaaaacgcaacaaaggaaacaacactccacacaacgaccacaacaagggatccagaggtgagggaaacaaaaaccaccaagccccaggccaatgaaggagcaacaaacccaagcaggaacctcaccaccaagggagacaaacaccaaacgacaagagcaacaacagaggcagaactggaaaaacaaagcaagcaaaccacagagccaggcaccagcacccaaaagcacacccccgcaaggccaagcagcaaatcccccaccacaacacaagcaacagcacaaccgacaacaccaacagccccaaaagcaagcacagcacccaagaacagacaggcaacaaccaaaaaaaccgaaacggacaccacaacagcaagcagagcaaggaacaccaacaaccccacagagacagcaacaacaacccccaaagcaacaacagaaacaggcaagggcaaagaggggccaacacagcacacaaccaaagaacagcccgagacaacagcacgagagacaacaaccccacagccaagaagaacagccggagctagcccaagagcaagttagttaa

SEQ ID NO: 134 - DNA, 669 bp, Human Metapneumovirus
atggaggtgaaagtagagaacattcgagcaatagacatgctcaaagcaagagtgaaaaatcgtgtggcacgtagcaaatgctttaaaaatgcttctttaatcctcataggaataactacactgagtatagctctcaatatctatctgatcataaactacacaatacaaaaaacctcatctgaatcagaacaccacaccagctcaccacccacagaatccaacaaggaagcttcaacaatctccacagacaacccagacatcaatccaaactcacagcatccaactcaacagtccacagaaaaccccacactcaaccccgcagcatcagtgagcccatcagaaacagaaccagcatcaacaccagacacaacaaaccgcctgtcctccgtagacaggtccacagcacaaccaagtgaaagcagaacaaagacaaaaccgacagtccacacaagaaacaacccaagcacagcttccagtacacaatccccaccacgggcaacaacgaaggcaatccgcagagccaccactttccgcatgagcagcacaggaaaaagaccaaccacaacatcagtccagtccgacagcagcaccacaacccaaaatcatgaagaaacaggttcagcgaacccacaggcatctgtaagcacaatgcaaaactagcacaccaac

SEQ ID NO: 135 - DNA, 1350 bp, Influenza virus
atgaatccaaatcagaagataataaccatcggatcaatctgtatggtaattggaatagttagcttaatgttacaaattgggaacatgatctcaatatgggtcagtcattcaattcagacagggaatcaacaccaagctgaaccaatcagcaatactaattttcttactgagaaagctgtggcttcagtaacattagcgggcaattcatctctttgccccattagcggatgggctgtacacagtaaggacaacagtataaggatcggttccaagggggatgtgtttgttataagagagccgttcatctcgtgctcccacttagaatgtagaactttctttttgactcagggagccttgctgaatgacaagcactccaatgggactgttaaagacagaagccctcacagaacattaatgagttgtcctgtgggtgaggctccctccccatataactcaaggtttgagtctgttgcttggtcagcaagtgcttgccatgatggcaccagttggttgacaattggaatttcgggcccagacaatggggctgtggctgtattgaagtacaatggcataataacagacactatcaagagttggaggaacaacatactgagaactcaagagtctgaatgtgcatgtgtaaatggctcttgctttactgtaatgactgatggaccaagtaatgggcaggcatcatataaaatcttcaagatggaaaaagggaaagtggttaaatcagtcgaattggatgctcctaattatcattatgaggagtgctcctgttatcctgatgccggcgaaatcacatgtgtgtgcagggataattggcatggctcaaataggccatgggtatctttcaatcaaaatttggagtatcaaatagggtatatatgcagtggagttttcggagacaatccacgccccaatgatggaacaggtagttgtggtccggtgtcccctaacggggcatatggggtaaaagggttttcatttaaatacggcaatggtgtttggatcgggagaaccaaaagcactaattccaggagcggctttgaaatgatttgggatccaaatgggtggactggaacagacagtagcttttcggtgaaacaagatatcgtagcaataactgattggtcaggatatagcgggagttttgtccagcatccagaactgacaggattagattgcataagaccttgtttctgggttgagttaatcagagggcggcccaaagagagcacaatttggactagtgggagcagcatatccttttgtggtgtaaatagtgacactgtgggttggtcttggccagacggtgctgagttgccattcaccattgacaagtag

SEQ ID NO: 136 - DNA, 1410 bp, Influenza virus
atgaatccaaatcaaaagataataacgattggctctgtttctctcaccattgccacaatatgcttccttatgcaaattgccatcctggtaactactgtaacattgcatttcaagcaatatgaatgcaactcccccccaaacaaccaagtgatgctgtgtgaaccaacaataatagaaagaaacataacagagatagtgtatctgaccaacaccaccatagagaaggaaatatgccccaaactagcagaatacagaaattggtcaaagccgcaatgtaacattacaggatttgcacctttttctaaggacaattcgattcggctttccgctggtggggacatctgggtgacaagagaaccttatgtgtcatgcgatcctgacaagtgttatcaatttgcccttggacagggaacaacactaaacaacggacattcaaatgacacagtacatgataggaccccttatcggaccctattgatgaatgagttgggtgttccatttcatttgggaaccaagcaagtgtgcatagcatggtccagctcaagttgtcacgatggaaaagcatggctgcatgtttgtgtaacgggggatgatgaaaatgcaactgctagcttcatttacaatgggaggcttgtagatagtattggttcatggtccaaaaaaatcctcaggacccaggagtcggaatgcgtttgtatcaatggaacttgtacagtagtaatgactgatgggagtgcttcaggaaaagctgatactaaaatactattcattgaggaggggaaaatcgttcatactagcctattgtcaggaagtgctcagcatgtcgaggagtgctcctgttatcctcgataccctggtgtcagatgtgtctgcagagacaactggaaaggctccaataggcccatcgtagatataaatgtaaaggattatagcattgtttccagttatgtgtgctcaggacttgttggagacacacccagaaaaaacgacagctccagcagtagccattgcttggatcctaacaatgaggaaggtggtcatggagtgaaaggctgggcctttgatgatggaaatgacgtgtggatgggaagaacgatcagcgagaagttacgctcaggatatgaaaccttcaaagtcattgaaggctggtccaaacctaactccaaattgcagataaataggcaagtcatagttgacagaggtaataggtccggttattctggtattttctctgttgaaggcaaaagctgcatcaatcggtgcttttatgtggagttgataaggggaaggaaacaggaaactgaagtcttgtggacctcaaacagtattgttgtgttttgtggcacctcaggtacatatggaacaggctcatggcctgatggggcggacatcaatctcatgcctatataa

SEQ ID NO: 137 - DNA, 1419 bp, Influenza virus
atgaatccaaatcagaagataataacaatcggggtagtgaacactactctatcaacaatagcccttctcattggagtgggaaatctggttttcaacacagtcatacatgagaaaatagggaatcaccaaacagtgattcacccaacaataacgactcctgcagtaccaaactgcagtgacactataataacatacaacaacactgtgataaacaacataacaacaacaataataactgaagcggaaaggctttttaagcctccactgccgctgtgccccttccgaggattcttcccttttcacaaggacaatgcaatacgattgggtgagaacaaggacgtcatagtcacaagagaaccttatgttagctgtgataatgacaattgttggtccttcgctctcgcacaaggagcactgttagggactaaacatagcaatggaaccatcaaagacagaacaccgtataggtctctaatccgattcccaataggaacagccccagtactgggaaattacaaggagatatgcattgcttggtcgagtagcagttgctttgacgggaaagagtggatgcatgtatgcatgacagggaacgataatgatgcaagtgcccaaataatatatgcagggagaatgacagactccatcaaatcatggagaaaggacatactaaggacccaagagtccgaatgtcaatgcattggcggaacttgtgttgttgctgttacagatggccctgctgctaatagtgcagatcatagggtttattggatacgggaggggagaatagtgaagtatgaaaatgtccctaaaacaaagatacaacacttagaagagtgttcctgctatgtggacatcgatgtgtactgtatatgcagggacaattggaagggttccaacagaccttggatgagaatcaacaacgagaccatactggaaacaggatatgtgtgcagcaaatttcactcagacactcccaggccagctgacccctcaacagtatcatgtgattctccaagcaacattaatggaggacccggagttaagggatttggcttcaaagccggcaatgatgtgtggttgggcaggacagtgtcaactagtggtagatcaggctttgaaatcatcaaagttacagatgggtggatcaactctcccaatcacgccaaatcagttacacaaacactagtgtccaacaatgattggtcaggctattcaggtagtttcattgtcaaaaccaagggctgtttccagccctgcttttatgtcgaacttatacgaggaaggcccaacaagaatgatgatgtctcttggacaagcaatagtatagttactttctgtgggttagacaatgaacctggatcgggaaattggccggatggttccaacattgggtttatgcccaagtaacagaaaaaa

SEQ ID NO: 138 - DNA, 1953 bp, Measles virus
agggtgcaagatcatccacaatgtcaccacaacgagaccgaataaatgccttctacaaagacaacccacatcctaagggaagtaggatagttattaacagagaacatcttatgattgatagaccttatgttttgctggctgttctattcgtcatgtttctgagcttgatcgggttgctagccattgcaggcattagactccatcgtgcagccatctacaccgcagagaaccataagagcctcagcaccaatctagatgtaactaactcaatcgagcatcaggtcaaggacgtgctgacaccactcttcaagatcattggtgatgaagtgggcctgaggacacctcagagattcactgacctagtgaaattcatctctgacaaaattaaattccttaatccggatagggagtacgacttcagagatctcacttggtgtatcaacccgccagagagaatcaaattggattatgatcaatactgtgcagatgtggctgctgaagaactcatgaatgcattggtgaactcaactctactggaggccagggcaaccaatcagttcctagctgtctcaaagggaaactgctcagggcccactacaatcagaggtcaattctcaaacatgtcgctgtccctgttggacttgtatttaagtcgaggttacaatgtatcgtctatagtcactatgacatcccagggaatgtacgggggaacttacctagtggaaaagcctaatctgagcagtaaagggtcagagttgtcacaactgagcatgcaccgagtgtttgaagtaggggttatcagaaatccgggtttgggggctccggtgttccatatgacaaactattttgagcaaccagtcagtaatgatttcagcaactgcatggtggctttgggggagcttaaattcgcagccctctgtcacagggaagattctatcacaattccctatcaggggtcagggaaaggtgtcagcttccagctcgtcaagctaggtgtctggaaatccccaaccgacatgcgatcctgggtccccctatcaacggatgatccagtgatagataggctttacctctcatctcacagaggtgttatcgctgacaatcaagcaaaatgggctgtcccgacaacacggacagatgacaagttgcgaatggagacatgcttccagcaggcgtgtaagggtaaaaaccaagcactctgcgagaatcccgagtgggcaccattgaaggataacaggattccttcatacggggtcttgtctgttaatctgagtctgacagttgagcttaaaatcaaaattgcttcaggattcgggccattgatcacacacggttcagggatggacctatacaaaaccaaccacaacaatgtgtattggctgactatcccgccaatgaagaacctagccttaggtgtaatcaacacattggagtggataccgagattcaaggttagtcccaacctcttcactgttccaatcaaggaagcaggcgaggactgccatgccccaacatacctacctgcggaggtggatggtgatgtcaaactcagttccaatctggtaattctacctggtcaggatctccaatatgttttggcaacctacgatacttccagggttgaacatgctgtggtttattatgtttacagcccaagccgctcattttcttacttttatccttttaggttgcctataaagggggtcccaatcgaattacaagtggaatgcttcacatgggacaaaaaactctggtgccgtcacttctgtgtgcttgcggactcagaatctggtggacatatcactcactctgggatggtgggcatgggagtcagctgcacagtcactcgggaagatggaaccaatcgcagatagggctgccagtgaaccgatcacatgatgtcacccagacatcaggcatacccactagtgtgaaatagacatcagaattaag

SEQ ID NO: 139 - DNA, 1821 bp, Mumps virus
atggagccctcgaaactattcataatgtcggacaacgccacctttgcacctggacctgttgttaatgcggctggtaagaagacattccgaacctgtttccgaatattggtcctatctgtacaagcagttacccttatattggttattgtcactttaggtgagcttattaggatgatcaatgatcaaggcttgagcaatcagttgtcttcaattacagacaagataagagaatcagctgctatgattgcatctgctgtgggagtaatgaatcaagtaattcatggagtaacggtatccttacccctacaaattgagggaaaccaaaatcaattattatccacacttgccacaatctgcacaaacagaaaccaagtttcaaactgctctacaaacatccccttagttaatgaccttaggtttataaatggaatcaataagttcatcattgaagattatgcaacccatgatttctccatcggccatccactcaacatgcctagctttatcccaactgcaacctcacccaatggttgcacaagaattccatccttttctttaggtaagacacattggtgttacacacataatgtaattaatgccaactgcaaggatcatacttcatcgaaccaatatgtttccatggggattctcgttcaaaccgcgtcagggtatcccatgttcaaaaccctaaaaatccaatatctcagtgatggcctgaatcggaaaagctgctcaattgcaacagtccctgatggttgcgcaatgtactgttacgtttcaactcaacttgaaaccgacgactatgcggggtccagcccacctacccagaaacttaccctgttgttctataatgacaccatcaaagaaaggacaatatctccgtctggtcttgaaggaaattgggctactttggtgccaggagtggggagtggaatatatttcgaaaataagttgatctttcctgcatatgggggtgtcttgcccaatagtacactaggagttaaatcagcaagagaatttttccggcccgttaatccatataatccatgttcaggaccaccacaagagttagatcagcgtgctttgagatcatatttcccaagttacttctctagtcgaagggtacagagtgcatttctggtctgtgcctggaatcagatcctagttacaaattgcgagctagttgtcccctcaaacaatcagacacttatgggtgcagaaggaagagttttattgatcaataatcggctattatattatcagaggagtactagctggtggccgtatgaactcctctatgagatatcattcacatttacaaactctggtcaatcatctgtgaatatgtcctggatacctatatattcattcacccgtcctggtttgggcaaatgcagtggtgaaaatatatgcccaacagtctgtgtatcaggagtttatcttgatccctggccattaactccatacagccatcaatcaggcattaacagaaatttctatttcacaggtgcactgctaaattcaagcacaaccagggtgaatcctaccctttatgtctctgcccttaataatcttaaagtactagccccatatggtactcaaggattgtttgcgtcatacaccacaaccacctgctttcaagataccggtgacgctagtgtgtattgtgtctatattatggaactagcatcgaatattgttggagaattccaaattctacctgtgctagccagattgaccatcacttgagttgtagtgaatgtagtaggaagctttatgggcgtgtctcatttcttatcgattattaagaaaaaacaggcc

SEQ ID NO: 140 - DNA, 1809 bp, Nipah virus
atgccggcagaaaacaagaaagttagattcgaaaatactacttcagacaaagggaaaattcctagtaaagttattaagagctactacggaaccatggacattaagaaaataaatgaaggattattggacagcaaaatattaagtgctttcaacacagtaatagcattgcttggatctatcgtgatcatagtgatgaatataatgatcatccaaaattacacaagatcaacagacaatcaggccgtgatcaaagatgcgttgcagggtatccaacagcagatcaaagggcttgctgacaaaatcggcacagagatagggcccaaagtatcactgattgacacatccagtaccattactatcccagctaacattgggctgttaggttcaaagatcagccagtcgactgcaagtataaatgagaatgtgaatgaaaaatgcaaattcacactgcctcccttgaaaatccacgaatgtaacatttcttgtcctaacccactcccttttagagagtataggccacagacagaaggggtgagcaatctagtaggattacctaataatatttgcctgcaaaagacatctaatcagatattgaagccaaagctgatttcatacactttacccgtagtcggtcaaagtggtacctgtatcacagacccattgctggctatggacgagggctattttgcatatagccacctggaaagaatcggatcatgttcaagaggggtctccaaacaaagaataataggagttggagaggtactagacagaggtgatgaagttccttctttatttatgaccaatgtctggaccccaccaaatccaaacaccgtttaccactgtagtgctgtatacaacaatgaattctattatgtactttgtgcagtgtcaactgttggagaccctattctgaatagcacctactggtccggatctctaatgatgacccgtctagctgtgaaacccaagagtaatggtgggggttacaatcaacatcaacttgccctacgaagtatcgagaaagggaggtatgataaagttatgccgtatggaccttcaggcatcaaacagggtgacaccctgtattttcctgctgtaggatttttggtcaggacagagtttaaatacaatgattcaaattgtcccatcacgaagtgtcaatacagtaaacctgaaaattgcaggctatctatggggattagaccaaacagccattatatccttcgatctggactattaaaatacaatctatcagatggggagaaccccaaagttgtattcattgaaatatctgatcaaagattatctattggatctcctagcaaaatctatgattctttgggtcaacctgttttctaccaagcgtcattttcatgggatactatgattaaatttggagatgttctaacagtcaaccctctggttgtcaattggcgtaataacacggtaatatcaagacccgggcaatcacaatgccctagattcaatacatgtccagagatctgctgggaaggagtttataatgatgcattcctaattgacagaatcaattggataagcgcgggtgtattccttgacagcaatcagaccgcagaaaatcctgtttttactgtattcaaagataatgaaatactttatagggcacaactggcttctgaggacaccaatgcacaaaaaacaataactaattgttttctcttgaagaataagatttggtgcatatcattggttgagatatatgacacaggagacaatgtcataagacccaaactattcgcggttaagataccagagcaatgtacataa

SEQ ID NO: 141 - DNA, 1717 bp, Parainfluenza virus
atggaagattacagcaatctatctcttaaatcaattcctaaaaggacatgtagaatcattttccgaactgccacaattcttggaatatgcacattgattgttctatgttcaagtattcttcatgagataattcatcttgatgtttcctctggtctcatggattccgatgattcacagcaaggcattattcagcctattatagaatcattaaaatcattaattgctttggctaaccagattctgtacaatgttgcaataataattcctcttaaaattgacagtatcgagactgtaatattctctgctttaaaggatatgcatactgggagcatgtccaacaccaactgtacacccggaaatctgcttctgcatgatgcagcgtacatcaatggaataaacaaattccttgtacttaaatcatacaatgggacgcctaaatatggacctctcctaaatattcccagctttatcccctcagcaacatctcccaacgggtgcactagaataccatcattttcactcattaagacccattggtgttacactcacaatgtaatgcttggagattgcctcgatttcacgacatctaatcagtatttagcaatggggataatacaacaatctgctgcagcatttccaatcttcaggactatgaaaaccatttacctaagtgatggaatcaatcgcaaaagctgttcagtcactgctataccaggaggttgtgtcttgtattgctatgtagctacaagatctgagaaagaagattatgccacaactgatctagctgaactgagacttgctttctattattataatgatacctttattgaaagagtcatatctcttccaaatacaacagggcaatgggccacaatcaatcctgcagttggaagcgggatctatcatctaggctttatcttatttcctgtatatggtggtctcataagtgggactccttcctacaacaagcagtcctcacgctattttatcccaaaacatcccaacataacctgtgccggtaactccagcgaacaggctgcagcagcacggagttcctatgtaatccgttatcactcaaacaggttgattcagagtgctgttcttatttgcccattgtctgacatgcacacagcaaggtgtaatctagttatgtttaacaattctcaagtcatgatgggtgcagaaggtaggctctatgttattgacaataatttgtattattatcaacgtagttcctcttggtggtctgcatcgcttttttacaggatcaatacagatttttctaaaggaattcctcctatcattgaggctcaatgggtaccgtcctatcaagttccccgtcctggagtcatgccatgcaatgcaacaagtttttgccctgctaattgcatcacaggggtgtacgcagatgtgtggccgcttaacgatccagaacccacatcacaaaatgctctgaatcccaactatcgatttgctggagcctttctcagaaatgagtccaaccgaaccaatcccacattctacactgcatcagccagcgccctactaaatactaccggattcaacaacaccaatcacaaagcagcatatacgtcttcaacctgctttaagaatactggaactcaaaagatttattgtttgataataattgaaatgggctcatctcttttaggggagttccaaataataccatttctaagggaactaataccttaat

SEQ ID NO: 142 - DNA, 1729 bp, Parainfluenza virus
atggctgaaaaagggaaaacaaatagttcatattggtctacaacccgaaatgacaattccacggtaaacacacacattaatacaccagcaggaaggacacacatctggctactgattgcaacaacaatgcatacagtattgtccttcattatcatgatcctatgcattgacctaattataaaacaagacacttgtatgaagacaaacatcatgacagtatcctccatgaacgaaagtgccaaaataatcaaagagacaatcacagaattaatcagacaagaagtaatatcaaggaccataaacatacaaagttcagtacaaagcgggatcccaatattgttaaacaagcaaagcagagatctcacacaattaatagagaagtcatgcaacagacaggaattggctcagatatgcgaaaacaccattgctattcaccatgcagacggcatatctcctctggacccacacgatttctggagatgtcccgtaggggaacccctactgagcaacaaccccaatatctcattattacctggaccaagtctactttctggatccaccacaatttcaggatgtgttagactaccttcattatcaattggtgatgcaatatatgcgtattcatcaaacttaatcactcaaggatgtgcagatatagggaagtcatatcaggttttacaattaggttacatatccttaaattcagatatgtatcctgatttaaacccggtaatttctcatacctatgacatcaacgacaacaggaaatcatgttctgtaatagctgcaggaacaaggggttatcagttatgctccttgcccactgtgaatgagactacagactactcgagtgaaggtatagaagatttagtatttgacatattagatctcaagggaaagaccaaatctcatcgatacaaaaatgaagatataacttttgaccatcctttttctgcaatgtatccgagtgtaggaagtgggataaaaattgaaaatacactcattttcctagggtacggtggcttaacaactccgctccaaggcgacactaagtgtgtgataaacagatgtaccaatgttaatcagagtgtttgcaatgatgctcttaagataacttggctaaagaaaagacaagttgtcaatgtcttaattcgtatcaataattatttatctgataggccaaagattgttgtcgagacaattccaataactcaaaattacttaggtgccgaaggtaggctacttaaactaggtaaaaagatctacatatatactagatcttcaggttggcactccaacctgcaaataggatcattagatatcaacaaccccatgaccattaaatgggcgcctcatgaagtcctgtctcgaccaggaaaccaagactgcaactggtacaacagatgtccgagagaatgcatatcaggtgtatatactgatgcatatccactatctcctgatgcagtcaatgttgctacaaccacactgtacgcaaacacatcacgtgttaatcccaccataatgtactcaaatacctcagaaattatcaacatgctaagactcaagaatgtacaactagaggcagcatacactactacatcatgtatcactcatttcgggaagggctactgcttccacattgttgaaatcaaccaagccagccttaataccttacaacctatgttgttcaagacaagtatccctaaaatatgtaaaatcacatcttaag

SEQ ID NO: 143 - DNA, 981 bp, respiratory syncytial virus
ggggcaaatgcaaacatgtccaaaaacaagaatcaacgtactgccaggactctagaaaagacctgggatactcttaatcatctaattgtaatatcctcttgtttatacaaattaaatttaaaatctatagcacaaatagcactatcagttttggcaatgataatctcaacctctctcataattgcagccataatattcatcatctctgccaatcacaaagttacactaacaactgtcacagttcaaacaataaaaaaccacactgagaaaaacatcaccacttaccttactcaagtctcaccagaaagggttagcccatccaaacaacccacaaccacaccaccaatccacacaaactcagccacaatatcacccaatacaaaatcagaaacacaccatacaacagcacaaaccaaaggcagaaccaccactccaacacagaacaacaagccaagcacaaaaccacgtccaaaaaatccaccaaaaaaaccaaaagatgattaccattttgaagtgttcaacttcgttccctgtagtatatgtggcaacaatcaactctgcaaatccatttgcaaaacaataccaagcaataaaccaaagaaaaaaccaaccataaaacccacaaacaaaccacccaccaaaaccacaaacaaaagagactcaaaaacactagccaaaacactgaaaaaagaaaccaccatcaacccaacaaaaaaaccaacccccaagaccacagaaagagacaccagcaccctacaatccattgtgcttgacacaaccacatcaaaacacacagaaagagacaccagcacctcacaatccattgtgctagacacaaccacatcaaaacacacaatccaacagcaatccctccactcaaccacccccgaaaacacacccaactccacacaaacacccacagcatccgagccctccacatcaaattccaaccaaaaactctagtcatatgcttagttattc

SEQ ID NO: 144 - DNA, 1525 bp, Vaccinia virus
tctagacactacactatatgcagttttaagatgccataattcgaaaaagttaagaagatacctcaacgagttaaaaaaatataataacgataagtcctttaaaatatattctaatattatgaatgagagataccttaatgtatattataaagatatgtacgtgtcaaaggtatatgataaactatttcctgttttcacagataaaaattgtctactaacattactaccttcagaaattatatacgaaatattatacatgctgacaattaacgatctttataatatatcgtatccacctaccaaagtatagttgtatttttctcatgcgatgtgtgtaaaaaaactgatattatataaatattttagtgccgtataataaagatgacgatgaaaatgatggtacatatatatttcgtatcattattgttattgctattccacagttacgccatagacatcgaaaatgaaatcacagaattcttcaataaaatgagagatactctaccagctaaagactctaaatggttgaatccagcatgtatgttcggaggcacaatgaatgatatagccgctctaggagagccattcagcgcaaagtgtcctcctattgaagacagtcttttatcgcacagatataaagactatgtggttaaatgggaaaggctagaaaaaaatagacggcgacaggtttctaataaacgtgttaaacatggtgatttatggatagccaactatacatctaaattcagtaaccgtaggtatttgtgtaccgtaactacaaagaatggtgactgtgttcagggtatagttagatctcatattaaaaaacctccttcatgcattccaaaaacatatgaactaggtactcatgataagtatggcatagacttatactgtggaattctttacgcaaaacattataataatataacttggtataaagataataaggaaattaatatcgacgatattaagtattcacaaacgggaaagaaattaattattcataatccagagttagaagatagtggaagatacaactgttacgttcattacgacgacgttagaatcaagaatgatatcgtagtatcaagatgtaaaatacttacggttataccgtcgcaagaccacaggtttaaactaatactagatccaaaaatcaacgtaacgataggagaacctgccaatataacatgcactgctgtgtcaacgtcattattgattgacgatgtactgattgaatgggaaaatccatccggatggcttataggattcgattttgatgtatactctgttttaactagtagaggcggtatcaccgaggcgaccttgtactttgaaaatgttactgaagaatatataggtaatacatataaatgtcgtggacacaactattattttgaaaaaacccttacaactacagtagtattggagtaaatacacaatgcatttttatatacattactgaataattattattattatttatatcgtatttgtgctatagaatgaatgaggatacgcg

SEQ ID NO: 145 - protein, 497 aa, Epstein Barr virus
MGSLEMVPMGAGPPSPGGDPDGYDGGNNSQYPSASGSSGNTPTPPNDEERESNEEPPPPYEDPYWGNGDRHSDYQPLGTQDQSLYLGLQHDGNDGLPPPPYSPRDDSSQHIYEEAGRGSMNPVCLPVIVAPYLFWLAAIAASCFTASVSTVVTATGLALSLLLLAAVASSYAAAQRKLLTPVTVLTAVVTFFAICLTWRIEDPPFNSLLFALLAAAGGLQGIYVLVMLVLLILAYRRRWRRLTVCGGIMFLACVLVLIVDAVLQLSPLLGAVTVVSMTLLLLAFVLWLSSPGGLGTLGAALLTLAAALALLASLILGTLNLTTMFLLMLLWTLVVLLICSSCSSCPLSKILLARLFLYALALLLLASALIAGGSILQTNFKSLSSTEFIPNLFCMLLLIVAGILFILAILTEWGSGNRTYGPVFMCLGGLLTMVAGAVWLTVMSNTLLSAWILTAGFLIFLIGFALFGVIRCCRYCCYYCLTLESEERPPTPYRNTV

SEQ ID NO: 146 - protein, 492 aa, Gadus callarias
MEPSSKKLTGRLMLAVGGAVLGSLQFGYNTGVINAPQKVIEEFYNQTWVHRYGESILPTTLTTLWSLSVAIFSVGGMIGSFSVGLFVNRFGRRNSMLMMNLLAFVSAVLMGFSKLGKSFEMLILGRFIIGVYCGLTTGFVPMYVGEVSPTAFRGALGTLHQLGIVVGILIAQVFGLDSIMGNKDLWPLLLSIIFIPALLQCIVLPFCPESPRFLLINRNEENRAKSVLKKLRGTADVTHDLQEMKEESRQMMREKKVTILELFRSPAYRQPILIAVVLQLSQQLSGINAVFYYSTSIFEKAGVQQPVYATIGSGIVNTAFTVVSLFVVERAGRRTLHLIGLAGMAGCAILMTIALALLEQLPWMSYLSIVAIFGFVAFFEVGPGPIPWFIVAELFSQGPRPAAIAVAGFSNWTSNFIVGMCFQYVEQLCGPYVFIIFTVLLVLFFIFTYFKVPETKGRTFDEIASGFRQGGASQSDKTPEELFHPLGADSQV

SEQ ID NO: 147 - protein, 938 aa, Glutamate receptor
MSTMRLLTLALLFSCSVARAACDPKIVNIGAVLSTRKHEQMFREAVNQANKRHGSWKIQLNATSVTHKPNAIQMALSVCEDLISSQVYAILVSHPPTPNDHFTPTPVSYTAGFYRIPVLGLTTRMSIYSDKSIHLSFLRTVPPYSHQSSVWFEMMRVYSWNHIILLVSDDHEGRAAQKRLETLLEERESKAEKVLQFDPGTKNVTALLMEAKELEARVIILSASEDDAATVYRAAAMLNMTGSGYVWLVGEREISGNALRYAPDGILGLQLINGKNESAHISDAVGVVAQAVHELLEKENITDPPRGCVGNTNIWKTGPLFKRVLMSSKYADGVTGRVEFNEDGDRKFANYSIMNLQNRKLVQVGIYNGTHVIPNDRKIIWPGGETEKPRGYQMSTRLKIVTIHQEPFVYVKPTLSDGTCKEEFTVNGDPVKKVICTGPNDTSPGSPRHTVPQCCYGFCIDLLIKLARTMNFTYEVHLVADGKFGTQERVNNSNKKEWNGMMGELLSGQADMIVAPLTINNERAQYIEFSKPFKYQGLTILVKKEIPRSTLDSFMQPFQSTLWLLVGLSVHVVAVMLYLLDRFSPFGRFKVNSEEEEEDALTLSSAMWFSWGVLLNSGIGEGAPRSFSARILGMVWAGFAMIIVASYTANLAAFLVLDRPEERITGINDPRLRNPSDKFIYATVKQSSVDIYFRRQVELSTMYRHMEKHNYESAAEAIQAVRDNKLHAFIWDSAVLEFEASQKCDLVTTGELFFRSGFGIGMRKDSPWKQNVSLSILKSHENGFMEDLDKTWVRYQECDSRSNAPATLTFENMAGVFMLVAGGIVAGIFLIFIEIAYKRHKDARRKQMQLAFAAVNVWRKNLQDRKSGRAEPDPKKKATFRAITSTLASSFKRRRSSKDTSTGGGRGALQNQKDTVLPRRAIEREEGQLQLCSRHRES

SEQ ID NO: 148 - protein, 399 aa, Hepatitis B virus
MGLSWTVPLEWGKNLSTSNPLGFLPDHQLDPAFRANTNNPDWDFNPKKDPWPEANKVGVGAYGPGFTPPHGGLLGWSPQSQGTLTTLPADPPPASTNRQSGRQPTPISPPLRDSHPQAMQWNSTAFHQALQNPKVRGLYFPAGGSSSGIVNPVPTIASHISSIFSRIGDPAPNMENITSGFLGPLLVLQAGFFLLTRILTIPQSLDSWWTSLNFLGGVPVCPGLNSQSPTSNHSPISCPPTCPGYRWMCLRRFIIFLFILLLCLIFLLVLLDYQGMLPVCPLIPGSSTTSTGPCKTCTTPAQGNSMYPSCCCTKPSDGNCTCIPIPSSWAFAKYLWEWASVRFSWLSLLVPFVQWFVGLSPTVWLSAIWMMWYWGPNLYNILSPFIPLLPIFFCLWVYI

SEQ ID NO: 149 - protein, 253 aa, prion
MANLGCWMLVLFVATWSDLGLCKKRPKPGGWNTGGSRYPGQGSPGGNRYPPQGGGGWGQPHGGGWGQPHGGGWGQPHGGGWGQPHGGGWGQGGGTHSQWNKPSKPKTNMKHMAGAAAAGAVVGGLGGYMLGSAMSRPIIHFGSDYEDRYYRENMHRYPNQVYYRPMDEYSNQNNFVHDCVNITIKQHTVTTTTKGENFTETDVKMMERVVEQMCITQYERESQAYYQRGSSMVLFSSPPVILLISFLIFLIVG

SEQ ID NO: 150 - DNA, 360 bp, Epstein Barr virus
ctatggggtccctagaaatggtgccaatgggcgcgggtccccctagccccggcggggatccggatgggtacgatggcggaaacaactcccaatatccatctgcttctggctcttctgggaacacccccaccccaccgaacgatgaggaacgtgaatctaatgaagagcccccaccgccttatgaggacccatattggggcaatggcgaccgtcactcggactatcaaccactaggaacccaagatcaaagtctgtacttgggattgcaacacgacgggaatgacgggctccctccccctccctactctccacgggatgactcatctcaacacatatacgaagaagcgggcagaggaaggt

SEQ ID NO: 151 - DNA, 215 bp, Epstein Barr virus
tatgaatccagtatgcctgcctgtaattgttgcgccctacctcttttggctggcggctattgccgcctcgtgtttcacggcctcagttagtaccgttgtgaccgccaccggcttggccctctcacttctactcttggcagcagtggccagctcatatgccgctgcacaaaggaaactgctgacaccggtgacagtgcttactgcggttgtcactt

SEQ ID NO: 152 - DNA, 99 bp, Epstein Barr virus
tctttgcaatttgcctaacatggaggattgaggacccaccttttaattctcttctgtttgcattgctggccgcagctggcggactacaaggcatttacg

SEQ ID NO: 153 - DNA, 249 bp, Epstein Barr virus
ttctggtgatgcttgtgctcctgatactagcgtacagaaggagatggcgccgtttgactgtttgtggcggcatcatgtttttggcatgtgtacttgtcctcatcgtcgacgctgttttgcagctgagtcccctccttggagctgtaactgtggtttccatgacgctgctgctactggctttcgtcctctggctctcttcgccagggggcctaggtactcttggtgcagcccttttaacattggcagcag

SEQ ID NO: 154 - DNA, 81 bp, Epstein Barr virus
ctctggcactgctagcgtcactgattttgggcacacttaacttgactacaatgttccttctcatgctcctatggacacttg

SEQ ID NO: 155 - DNA, 171 bp, Epstein Barr virus
tggttctcctgatttgctcttcgtgctcttcatgtccactgagcaagatccttctggcacgactgttcctatatgctctcgcactcttgttgctagcctccgcgctaatcgctggtggcagtattttgcaaacaaacttcaagagtttaagcagcactgaatttataccca

SEQ ID NO: 156 - DNA, 176 bp, Epstein Barr virus
atttgttctgcatgttattactgattgtcgctggcatactcttcattcttgctatcctgaccgaatggggcagtggaaatagaacatacggtccagtttttatgtgcctcggtggcctgctcaccatggtagccggcgctgtgtggctgacggtgatgtctaacacgcttttgtct

SEQ ID NO: 157 - DNA, 167 bp, Epstein Barr virus
gctttgccctctttggggtcattagatgctgccgctactgctgctactactgccttacactggaaagtgaggagcgcccaccgaccccatatcgcaacactgtataaaggtaagtattattaaattttagagacactatcacgtgtaacttgacgtgcaaggatgga

SEQ ID NO: 158 - DNA, 2856 bp, Glut-1
tagtcgcgggtccccgagtgagcacgccagggagcaggagaccaaacgacgggggtcggagtcagagtcgcagtgggagtccccggaccggagcacgagcctgagcgggagagcgccgctcgcacgcccgtcgccacccgcgtacccggcgcagccagagccaccagcgcagcgctgccatggagcccagcagcaagaagctgacgggtcgcctcatgctggctgtgggaggagcagtgcttggctccctgcagtttggctacaacactggagtcatcaatgccccccagaaggtgatcgaggagttctacaaccagacatgggtccaccgctatggggagagcatcctgcccaccacgctcaccacgctctggtccctctcagtggccatcttttctgttgggggcatgattggctccttctctgtgggccttttcgttaaccgctttggccggcggaattcaatgctgatgatgaacctgctggccttcgtgtccgccgtgctcatgggcttctcgaaactgggcaagtcctttgagatgctgatcctgggccgcttcatcatcggtgtgtactgcggcctgaccacaggcttcgtgcccatgtatgtgggtgaagtgtcacccacagcctttcgtggggccctgggcaccctgcaccagctgggcatcgtcgtcggcatcctcatcgcccaggtgttcggcctggactccatcatgggcaacaaggacctgtggcccctgctgctgagcatcatcttcatcccggccctgctgcagtgcatcgtgctgcccttctgccccgagagtccccgcttcctgctcatcaaccgcaacgaggagaaccgggccaagagtgtgctaaagaagctgcgcgggacagctgacgtgacccatgacctgcaggagatgaaggaagagagtcggcagatgatgcgggagaagaaggtcaccatcctggagctgttccgctcccccgcctaccgccagcccatcctcatcgctgtggtgctgcagctgtcccagcagctgtctggcatcaacgctgtcttctattactccacgagcatcttcgagaaggcgggggtgcagcagcctgtgtatgccaccattggctccggtatcgtcaacacggccttcactgtcgtgtcgctgtttgtggtggagcgagcaggccggcggaccctgcacctcataggcctcgctggcatggcgggttgtgccatactcatgaccatcgcgctagcactgctggagcagctaccctggatgtcctatctgagcatcgtggccatctttggctttgtggccttctttgaagtgggtcctggccccatcccatggttcatcgtggctgaactcttcagccagggtccacgtccagctgccattgccgttgcaggcttctccaactggacctcaaatttcattgtgggcatgtgcttccagtatgtggagcaactgtgtggtccctacgtcttcatcatcttcactgtgctcctggttctgttcttcatcttcacctacttcaaagttcctgagactaaaggccggaccttcgatgagatcgcttccggcttccggcaggggggagccagccaaagtgataagacacccgaggagctgttccatcccctgggggctgattcccaagtgtgagtcgccccagatcaccagcccggcctgctcccagcagccctaaggatctctcaggagcacaggcagctggatgagacttccaaacctgacagatgtcagccgagccgggcctggggctcctttctccagccagcaatgatgtccagaagaatattcaggacttaacggctccaggattttaacaaaagcaagactgttgctcaaatctattcagacaagcaacaggttttataatttttttattactgattttgttatttttatatcagcctgagtctcctgtgcccacatcccaggcttcaccctgaatggttccatgcctgagggtggagactaagccctgtcgagacacttgccttcttcacccagctaatctgtagggctggacctatgtcctaaggacacactaatcgaactatgaactacaaagcttctatcccaggaggtggctatggccacccgttctgctggcctggatctccccactctaggggtcaggctccattaggatttgccccttcccatctcttcctacccaaccactcaaattaatctttctttacctgagaccagttgggagcactggagtgcagggaggagaggggaagggccagtctgggctgccgggttctagtctcctttgcactgagggccacactattaccatgagaagagggcctgtgggagcctgcaaactcactgctcaagaagacatggagactcctgccctgttgtgtatagatgcaagatatttatatatatttttggttgtcaatattaaatacagacactaagttatagtatatctggacaagccaacttgtaaatacaccacctcactcctgttacttacctaaacagatataaatggctggtttttagaaacatggttttgaaatgcttgtggattgagggtaggaggtttggatgggagtgagacagaagtaagtggggttgcaaccactgcaacggcttagacttcgactcaggatccagtcccttacacgtacctctcatcagtgtcctcttgctcaaaaatctgtttgatccctgttacccagagaatatatacattctttatcttgacattcaaggcatttctatcacatatttgatagttggtgttcaaaaaaacactagttttgtgccagccgtgatgctcaggcttgaaatcgcattattttgaatgtgaagggaa

SEQ ID NO: 159 - DNA, 2878 bp, Glutamate receptor
gtacaaaaaagcagaagggccgtcaaggcccaccatgagcaccatgcgcctgctgacgctcgccctgctgttctcctgctccgtcgcccgtgccgcgtgcgaccccaagatcgtcaacattggcgcggtgctgagcacgcggaagcacgagcagatgttccgcgaggccgtgaaccaggccaacaagcggcacggctcctggaagattcagctcaatgccacctccgtcacgcacaagcccaacgccatccagatggctctgtcggtgtgcgaggacctcatctccagccaggtctacgccatcctagttagccatccacctacccccaacgaccacttcactcccacccctgtctcctacacagccggcttctaccgcatacccgtgctggggctgaccacccgcatgtccatctactcggacaagagcatccacctgagcttcctgcgcaccgtgccgccctactcccaccagtccagcgtgtggtttgagatgatgcgtgtctacagctggaaccacatcatcctgctggtcagcgacgaccacgagggccgggcggctcagaaacgcctggagacgctgctggaggagcgtgagtccaaggcagagaaggtgctgcagtttgacccagggaccaagaacgtgacggccctgctgatggaggcgaaagagctggaggcccgggtcatcatcctttctgccagcgaggacgatgctgccactgtataccgcgcagccgcgatgctgaacatgacgggctccgggtacgtgtggctggtcggcgagcgcgagatctcggggaacgccctgcgctacgccccagacggcatcctcgggctgcagctcatcaacggcaagaacgagtcggcccacatcagcgacgccgtgggcgtggtggcccaggccgtgcacgagctcctcgagaaggagaacatcaccgacccgccgcggggctgcgtgggcaacaccaacatctggaagaccgggccgctcttcaagagagtgctgatgtcttccaagtatgcggatggggtgactggtcgcgtggagttcaatgaggatggggaccggaagttcgccaactacagcatcatgaacctgcagaaccgcaagctggtgcaagtgggcatctacaatggcacccacgtcatccctaatgacaggaagatcatctggccaggcggagagacagagaagcctcgagggtaccagatgtccaccagactgaagattgtgacgatccaccaggagcccttcgtgtacgtcaagcccacgctgagtgatgggacatgcaaggaggagttcacagtcaacggcgacccagtcaagaaggtgatctgcaccgggcccaacgacacgtcgccgggcagcccccgccacacggtgcctcagtgttgctacggcttttgcatcgacctgctcatcaagctggcacggaccatgaacttcacctacgaggtgcacctggtggcagatggcaagttcggcacacaggagcgggtgaacaacagcaacaagaaggagtggaatgggatgatgggcgagctgctcagcgggcaggcagacatgatcgtggcgccgctaaccataaacaacgagcgcgcgcagtacatcgagttttccaagcccttcaagtaccagggcctgactattctggtcaagaaggagattccccggagcacgctggactcgttcatgcagccgttccagagcacactgtggctgctggtggggctgtcggtgcacgtggtggccgtgatgctgtacctgctggaccgcttcagccccttcggccggttcaaggtgaacagcgaggaggaggaggaggacgcactgaccctgtcctcggccatgtggttctcctggggcgtcctgctcaactccggcatcggggaaggcgcccccagaagcttctcagcgcgcatcctgggcatggtgtgggccggctttgccatgatcatcgtggcctcctacaccgccaacctggcggccttcctggtgctggaccggccggaggagcgcatcacgggcatcaacgaccctcggctgaggaacccctcggacaagtttatctacgccacggtgaagcagagctccgtggatatctacttccggcgccaggtggagctgagcaccatgtaccggcatatggagaagcacaactacgagagtgcggcggaggccatccaggccgtgagagacaacaagctgcatgccttcatctgggactcggcggtgctggagttcgaggcctcgcagaagtgcgacctggtgacgactggagagctgtttttccgctcgggcttcggcataggcatgcgcaaagacagcccctggaagcagaacgtctccctgtccatcctcaagtcccacgagaatggcttcatggaagacctggacaagacgtgggttcggtatcaggaatgtgactcgcgcagcaacgcccctgcgacccttacttttgagaacatggccggggtcttcatgctggtagctgggggcatcgtggccgggatcttcctgattttcatcgagattgcctacaagcggcacaaggatgctcgccggaagcagatgcagctggcctttgccgccgttaacgtgtggcggaagaacctgcaggatagaaagagtggtagagcagagcctgaccctaaaaagaaagccacatttagggctatcacctccaccctggcttccagcttcaagaggcgtaggtcctccaaagacacgagcaccgggggtggacgcggcgctttgcaaaaccaaaaagacacagtgctgccgcgacgcgctattgagagggaggagggccagctgcagctgtgttcccgtcatagggagagctcaggcctcatgggcccagctttcttgtac

SEQ ID NO: 160 - DNA, 365 bp, Hepatitis B virus
atggggctttcttggacggtccctctcgagtggggaaagaacctttccaccagcaatcctctaggattccttcccgatcaccagttggacccagcattcagagcaaataccaacaatccagattgggacttcaatcccaaaaaggacccttggccagaggccaacaaggtaggagttggagcctatggacccgggttcacccctccacacggaggccttttggggtggagccctcagtctcagggcacactaacaactttgccagcagatccgcctcctgcctccaccaatcgtcagtcagggaggcagcctactcccatctctccaccactaagagacagtcatcctcaggccatgcagtggaa

SEQ ID NO: 161 - DNA, 2746 bp, prion
attaaagatgatttttacagtcaatgagccacgtcagggagcgatggcacccgcaggcggtatcaactgatgcaagtgttcaagcgaatctcaactcgttttttccggtgactcattcccggccctgcttggcagcgctgcaccctttaacttaaacctcggccggccgcccgccgggggcacagagtgtgcgccgggccgcgcggcaattggtccccgcgccgacctccgcccgcgagcgccgccgcttcccttccccgccccgcgtccctccccctcggccccgcgcgtcgcctgtcctccgagccagtcgctgacagccgcggcgccgcgagcttctcctctcctcacgaccgagtcattatggcgaaccttggctgctggatgctggttctctttgtggccacatggagtgacctgggcctctgcaagaagcgcccgaagcctggaggatggaacactgggggcagccgatacccggggcagggcagccctggaggcaaccgctacccacctcagggcggtggtggctgggggcagcctcatggtggtggctgggggcagcctcatggtggtggctgggggcagccccatggtggtggctggggacagcctcatggtggtggctggggtcaaggaggtggcacccacagtcagtggaacaagccgagtaagccaaaaaccaacatgaagcacatggctggtgctgcagcagctggggcagtggtggggggccttggcggctacatgctgggaagtgccatgagcaggcccatcatacatttcggcagtgactatgaggaccgttactatcgtgaaaacatgcaccgttaccccaaccaagtgtactacaggcccatggatgagtacagcaaccagaacaactttgtgcacgactgcgtcaatatcacaatcaagcagcacacggtcaccacaaccaccaagggggagaacttcaccgagaccgacgttaagatgatggagcgcgtggttgagcagatgtgtatcacccagtacgagagggaatctcaggcctattaccagagaggatcgagcatggtcctcttctcctctccacctgtgatcctcctgatctctttcctcatcttcctgatagtgggatgaggaaggtcttcctgttttcaccatctttctaatctttttccagcttgagggaggcggtatccacctgcagcccttttagtggtggtgtctcactctttcttctctctttgtcccggataggctaatcaatacccttggcactgatgggcactggaaaacatagagtagacctgagatgctggtcaagccccctttgattgagttcatcatgagccgttgctaatgccaggccagtaaaagtataacagcaaataaccattggttaatctggacttatttttggacttagtgcaacaggttgaggctaaaacaaatctcagaacagtctgaaatacctttgcctggatacctctggctccttcagcagctagagctcagtatactaatgccctatcttagtagagatttcatagctatttagagatattttccattttaagaaaacccgacaacatttctgccaggtttgttaggaggccacatgatacttattcaaaaaaatcctagagattcttagctcttgggatgcaggctcagcccgctggagcatgagctctgtgtgtaccgagaactggggtgatgttttacttttcacagtatgggctacacagcagctgttcaacaagagtaaatattgtcacaacactgaacctctggctagaggacatattcacagtgaacataactgtaacatatatgaaaggcttctgggacttgaaatcaaatgtttgggaatggtgcccttggaggcaacctcccattttagatgtttaaaggaccctatatgtggcattcctttctttaaactataggtaattaaggcagctgaaaagtaaattgccttctagacactgaaggcaaatctcctttgtccatttacctggaaaccagaatgattttgacatacaggagagctgcagttgtgaaagcaccatcatcatagaggatgatgtaattaaaaaatggtcagtgtgcaaagaaaagaactgcttgcatttctttatttctgtctcataattgtcaaaaaccagaattaggtcaagttcatagtttctgtaattggcttttgaatcaaagaatagggagacaatctaaaaaatatcttaggttggagatgacagaaatatgattgatttgaagtggaaaaagaaattctgttaatgttaattaaagtaaaattattccctgaattgtttgatattgtcacctagcagatatgtattacttttctgcaatgttattattggcttgcactttgtgagtattctatgtaaaaatatatatgtatataaaatatatattgcataggacagacttaggagttttgtttagagcagttaacatctgaagtgtctaatgcattaacttttgtaaggtactgaatacttaatatgtgggaaacccttttgcgtggtccttaggcttacaatgtgcactgaatcgtttcatgtaagaatccaaagtggacaccattaacaggtctttgaaatatgcatgtactttatattttctatatttgtaactttgcatgttcttgttttgttatataaaaaaattgtaaatgtttaatatctgactgaaattaaacgagcgaagatgagcaccaaaaaaaaaaaaaaaa

SEQ ID NO: 162 - protein, 267 aa, Hepatitis A virus
SGGFSTTVSTEQNVPDPQVGITTMKDLKGKANKGKMDVSGVQAPVGAITTIEDPVLAKKVPETFPELKPGESRHTSDHMSIYKFMGRSHFLCTFTFNSNNKEYTFPITLSSTSNPPHGLPSTLRWFFNLFQLYRGPLDLTIIITGATDVDGMAWFTPVGLAVDTPRVEKESAPSIDYKTALGAVRFHSRRTGNIQIRLSWYSYLYAVSGALDGLGDKTDSTFGLVSIQIANYNHSDEYLSFSCYLSVTEQSEFYFPRAPLNSNALLS

SEQ ID NO: 163 - protein, 482 aa, Human Parvovirus
GGSNPVKSMWSEGATFSANSVTCTFSRQFLIPYDPEHHYKVFSPAASSCHNASGKEAKVCTISPIMGYSTPWRYLDFNALNLFFSPLEFQHLIENYGSIAPDALTVTISEIAVKDVTDKTGGGVQVTDSTTGRLCMLVDHEYQYPYVLGQGQDTLAPELPIWVYFPPQYAYLTVGDVNTQGISGDSKKLASEESAFYVLEHSSFQLLGTGGTATMSYKFPPVPPENLEGCSQHFYEMYNPLYGSRLGVPDTLGGDPKFRSLTHEDHAIQPQNFMPGPLVNSVSTKEGDSSNTGAGKALTGLSTGTSQNTRISLRPGPVSQPYHHWDTDKYVTGINASSHGQTTYGNAEDKEYQQGVGRFPNEKEQLKQLQGLNMHTYFPNKGTQQYTDQIERPLMVGSVWNRRALHYESQLWSKIPNLDDSFKTQFAALGGWGLHQPPPQIFLKILPQSGPIGGIKSMGITTLVQYAVGIMTVTMTFKLGPR

SEQ ID NO: 164 - protein, 541 aa, Norovirus
MKMASNDAAPSNDGAAGLVPEINTETLPLEPVAGAALAAAVTGQSNIIDPWIRTNFVQAPNGEFTVSPRNSPGEVLLNLELGPDLNPYLAHLSRMYNGYAGGVEVQVLLAGNAFTAGKILFAAVPPNFPVEFLSPAQITMLPHLIVDVRTLEPIMIPLPDVRNTFFHYNNRPSERMRLVAMLYTPLRSNGSGDDVFTVSCRVLTRPTPDFEFTYLVPPSVESKTKPFSLPILTISELTNSRFPAPIDSLFTAQNNNLNVQCQNGRCTLDGELQGTTQLLPTGICAFRGKISADVQNSHQDRWHMQLTNLNGTPFDPTDDVPAPLGTPDFTGLLFGVASQRNVGGTGNNTTRAHEVVIATTSTQFVPKLGSINFGSESEDFQVGPPTKFTPVGIKIETGHSFRQWDPPNYSGALTLNMNLAPPVAPNFPGEQLLFFRSNVPCAGGVSEGIIDCLLPQEWIQHFYQESAPSQSDVALIRYVNPDTGRTLFEAKLHRTGYITVAHSGDYPLVVPSNGYFRFDSWINQFYSLAPMGTGNGRRRVQ

SEQ ID NO: 165 - protein, 274 aa, Human rhinovirus
NPVEDYIDKVVDTVLQVPNTQPSGPQHSIQPSALGAMEIGASSTTIPGDLIETRYVINSNTNSEALIENFMGRSALWAKIQVANGFAKWDINFQEHAQVRKKFEMFTYARFDMEVTVVTNNTGLVQIMFVPPGIDAPDSIDSRLWDSASNPSVFYQPKSGFPRFTIPFTGLGSAYYMFYDGYDVPRNKSNAVYGITSTNDMGTLCFRAMEDTNEHSIRVFVKPKHTIAWIPRPPRATQYTHKFSTNYHVKKPDDTTGLLIQKHFINHRTDIKTA

SEQ ID NO: 166 - protein, 775 aa, Human rotavirus
MASLIYRQLLSNSYVTNISDEVNEIGTKKTTNVTVNPGPFAQTGYAPVDWGHGELPDSTLVQPTLDGPYQPTSLNLPVDYWMLIAPTREGKVAEGTNTTDRWFACVLVEPNVQNTQRQYVLDGQNVQLHVSNDSSTSWKFILFIKLTPYGTYTQYSTLSTPHKLCAWMKRDNRVYWYQGATPNASESYYLTINNDNSNVSSDAEFYLIPQSQTAMCTQYINNGLPPIQNTRNIVPVNITSRQIKDVRAQMNEDIVISKTSLWKEMQYNRDIIIRFKFANSIIKSGGLGYKWSEISFKPMNYQYTYTRDEEEVTAHTTCSVNGVNDFNYNGGTLPTDFAISRFEVIKENSYVYVDYWDDSQAFRNMVYVRSLAANLNDVVCSGGSYSFALPVGNHPVMSGGAVTLTSAGVTLSTQYTDYVSLNSLQFRFRLAVSEPSFSISRTRMSGIYGLPAVNPNNSAEYYEIAGRFSLISLVPTNDDYQTPIANSVTVRQDLERQLGELREEFNSLSQEIAVSQLIDLATLPLDMFSMFSGIKSTVEAVKSMTTNVMKRFKTSSLANAISDLTSNMSEAASSVRLTSVRSVGTITLPRARVSLQVGDDLRSMQDVSTQVSNVSRNLRLKEFTTQTDTLSFDDISAAVLKTKLDKSTQISQQTMPDIIAESSEKFIPKRSYRIVDEDIRFETGIDGTFYAYKVDTFNEIPFDMERFNKLITDSPVLSAIIDFKTLKNLNDNYGITKKQAMELLHSNPKTLKEFINNNNPIIRNRIENLISQCRL

SEQ ID NO: 167 - DNA, 800 bp, Hepatitis A virus
tctgggggtttttcaacaacagtttctacagagcagaatgttccagatccccaagttggtataacaaccatgaaggatttaaaaggcaaagctaataagggaaaaatggatgtttcaggagtgcaagcacctgtgggagctatcacaacaattgaggatcctgttttagcaaagaaagtacctgagacattccctgaattgaaacctggagagtccaggcatacatcagatcatatgtctatttacaagtttatgggaaggtctcattttttgtgcacttttacttttaattcaaacaataaagagtacacatttcctataaccttgtcttcaacctccaatcctcctcatggtttaccatcaacattgaggtggtttttcaatttgtttcaattgtatagaggacctttagatctgacaattatcatcactggagcaactgatgtagatggcatggcttggtttacaccagtaggtcttgccgttgatactcctcgggtagagaaggagtcagctccgtctattgactacaaaactgctcttggagctgtcagatttcactcaaggagaacagggaacattcagattaggttatcatggtattcttatttatatgctgtgtctggagcactggatggtttgggagataagacagattctacattcggattggtttctattcagattgcaaattataatcattctgatgaatatttgtcttttagttgctatttgtctgtcacagaacaatcagaattttattttcccagagctccattgaattcaaatgccttgttatc

SEQ ID NO: 168 - DNA, 1445 bp, Human Parvovirus
gggggcagtaatcctgttaaaagcatgtggagtgagggggccacttttagtgccaactctgtaacttgtacattttccagacagtttttaattccatatgacccagagcaccattataaggtattttctcccgcagcaagtagctgccacaatgccagtggaaaggaggcaaaggtttgcaccattagtcccataatggggtactcaaccccatggagatatttagattttaatgcattaaatttatttttttcacctttagagtttcagcacttaattgaaaattatggcagtatagctcctgatgctttaactgtaaccatatcagaaattgctgttaaggacgttacagacaaaactggagggggggtacaggttactgacagcactacagggcgcctatgcatgttagtggaccatgaatatcagtacccatatgtgttagggcaaggtcaggatactttagccccagaacttcctatttgggtatactttccccctcaatatgcttacttaacagtaggagatgttaacacacaaggaatttctggagacagcaaaaaattagcaagtgaagaatcagcattttatgttttggaacacagttcttttcagcttctaggtacaggaggtacagcaactatgtcttataagtttcctccagtgcccccagaaaatttagagggctgcagtcaacacttttatgaaatgtacaatcccttatacggatcccgcttaggggttcctgacacattaggaggtgacccaaaatttagatctttaacacatgaagaccatgcaattcagccccaaaacttcatgccagggccactagtaaactcagtgtctacaaaggagggagacagctctaatactggagctggaaaagccttaacaggccttagcacaggtacctctcaaaacactagaatatccctacgccctgggccagtgtctcagccataccaccactgggacacagataaatatgtcacaggaataaatgccagttctcatggtcagaccacttatggtaacgctgaagacaaagagtatcagcaaggagtgggtagatttccaaatgaaaaagagcagctaaaacagttacagggtttaaacatgcacacctactttcccaataaaggaacccagcaatatacagatcaaattgagcgacccctaatggtgggttctgtatggaacagaagagcccttcactatgaaagccagctgtggagtaaaattccaaatttagatgacagttttaaaactcagtttgcagccttaggaggatggggtttgcatcagccacctcctcaaatatttttaaaaatattaccacaaagtgggccaattggaggtattaaatcaatgggaattactaccttagttcagtatgctgtgggaattatgacagtaactatgacatttaaattggggccccg

SEQ ID NO: 169 - DNA, 2459 bp, Norovirus
gtgaatgaagatggcgtcgaatgacgccgctccatctaatgatggtgctgcgggcctcgtcccagagatcaacaccgagacccttcccctggaaccagtggctggtgcagctcttgctgcggctgtcactggtcaaagtaatataattgatccctggattagaacaaattttgtgcaagcacccaatggggagttcactgtttcacctaggaattccccaggagaagtcctcctaaatttagaattaggtcctgatttaaatccttatttggcacacttatctagaatgtataatgggtatgctggtggagtggaggtccaggttctcctagcagggaacgcgttcaccgctggaaagatcctcttcgctgccgtaccgccaaatttcccagttgaattcttaagtcctgcccaaatcactatgctcccacatttgatagttgacgtcaggacccttgagccaattatgatacccctccccgacgtgagaaacaccttcttccattacaataataggccctctgagcgtatgcgtttggtggccatgttgtacacacccctgagatccaacggttcaggtgatgatgtcttcacagtctcatgcagagtgctaactagacccactccagattttgaatttacctacctagttccaccctcagtagagtctaagacaaagcctttctctcttcccatcttaaccatttctgaattgactaattcaaggtttccagcacccattgattcattgtttactgcccaaaataacaatcttaatgtccaatgtcagaatggtcggtgcacactagatggtgagttgcagggaaccacccagctgctcccaactggaatatgtgccttcagagggaaaatatcagcagatgtgcaaaacagtcaccaagacaggtggcacatgcagttgacaaatctcaatggaaccccatttgacccaacagatgatgtcccagctccgcttggcacccctgacttcacaggtctactgtttggggttgcaagtcaaagaaacgttggtggaacaggtaacaacactaccagggcccacgaggtagtgatagcaacaactagcacacaatttgttccaaaattgggttctattaattttgggagtgaaagtgaagattttcaagtgggcccaccaaccaaattcacaccagttggaatcaaaattgaaaccgggcactctttcagacaatgggacccacctaactattctggagcactgaccctcaacatgaaccttgccccacctgttgccccaaatttcccaggtgagcagctgctcttctttagatcaaatgttccttgtgctggtggtgtcagtgagggtatcattgactgcctactgcctcaagagtggatacaacatttctaccaggaatccgctccatcccaatcagatgtggcactgatcagatatgtcaaccctgacacgggccgcactctctttgaggcaaaactccacaggactggttacattactgttgctcactctggtgactatcctcttgttgttccttccaatggctacttcagatttgattcttggataaatcaattttactcactcgcccccatgggaactgggaatgggcgcaggagagtgcagtaatggcaggagcttttatagcaggtcttgcaggtgacatgctcacctctgctgtaggctcactggcgaatgccggagcaaatgccataacacagaaaattgactttgaaaacaacaaacaactccaaacggcctcctttcaacatgacaaagatatgctccgcgcacaagtggatgcaaccaagcagctgcaggcagaaatgattgccatcaaacaggggatcttgaccgctggcggcttctcccctgctgacgcagcgagaggggctgtaggagcacccatgaccaaggtgcttgactggtctggcacacgctattgggcaccaaattctaccaaaacaacaagttactccgggcagttcacatcagcgcctgtgcacacaccaaatttcaacagcaaacccaggcctcctgccaaaacccagccttcttcttcttcttctggtagtgtttatagtctttcaacccaatcaacttcgctccctggaccctcttcttcgggttcatctgtttcttctgtctcaacacaatcaacaaaattgagttcagtttcttctatgagtagaacagcagattgggtcaatcaacaaaggagcctcagcccttacatgagcggggcccttaatatttctcatgtgacacctccatcaagcagggcttcaagttcgggaacagtgtcaactgtacccaaagaagttttggactcctggacatctgcattcaacacacgcagacagccgctcttcgcacacctcagagtgaggggggagtcacgtgtttagtgaaaagaatcaattagttttaattaggttaaattttaattggatctttt

SEQ ID NO: 170 - DNA, 810 bp, Human rhinovirus
tcaaaacccagttgaggactacatagacaaggtggtcgacactgtactacaggtcccaaacacccaacccagtggtccacaacacagtattcaaccaagtgctttgggcgctatggaaattggggcatcttcaaccaccataccaggtgatctcatagagactaggtatgtaatcaactcaaatactaacagtgaagccctaattgagaacttcatgggccgctcagctctttgggccaagatccaggtggcgaatggttttgcaaaatgggatataaacttccaagagcatgcacaagtcagaaagaaatttgaaatgtttacatatgctagatttgacatggaagttactgttgtcaccaacaacacaggtttggtacaaatcatgtttgtaccacctggtatagatgcaccagatagtattgactcccgtctatgggattctgcctccaacccgagtgttttctatcaaccaaaatcaggttttcctaggtttactattccattcactggattgggttcagcttattatatgttttatgatggttatgatgtccccagaaataaaagtaatgctgtgtatggtatcacatctacaaatgatatggggacactttgcttcagagctatggaagacaccaatgaacacagcattagagtctttgtaaagcctaaacataccatagcatggattccacgaccacctcgtgccacccaatacacccacaaattcagcacaaactaccatgttaagaaaccagatgacactactggactactaatacagaaacactttattaaccacaggac

SEQ ID NO: 171 - DNA, 2359 bp, Human rotavirus
ggctataaaatggcttctttaatttatagacagttattatcaaactcatatgttacaaacatctctgacgaagttaatgaaattggaactaaaaaaacaactaacgttactgttaatccagggccattcgcacaaacgggatatgcgcctgttgactggggacatggtgaattgcctgattctacattggtgcagccaactcttgatggtccataccaacccacctcactcaacttaccagttgattattggatgttaattgcgcctactagagaaggaaaagttgctgaaggtacaaatacgactgacagatggttcgcttgtgtactagttgaaccaaatgtgcaaaatacacaaagacaatacgtattagatgggcaaaatgtccaattgcatgtctcaaacgattcaagtacttcgtggaaatttatattattcattaaattgacgccttatggaacgtacactcaatattcaacattatcaacgccgcataagttgtgcgcgtggatgaaaagagataacagagtgtactggtatcaaggagcgacaccgaacgcatcagagagctattacttgaccataaacaatgataacagcaacgtttcaagtgacgctgaattttatttaataccgcaatcgcagaccgctatgtgtacacaatatataaacaatggtttaccaccaattcagaataccaggaatattgtaccagtaaatattacatctagacagattaaagacgtaagagctcagatgaatgaagacatagtaatatcaaaaacctcgttatggaaagaaatgcaatataatagagatataatcattagatttaaatttgctaattcaataatcaaatcaggtggactaggttataagtggtcggaaatatcatttaagcccatgaactatcaatatacgtatacgagagatgaagaagaagtaacagcacatacaacatgttcagtgaatggtgtcaatgattttaattataatggaggtacgttgcctactgattttgcaatatcgagatttgaggtcataaaggaaaattcttatgtatatgtagattattgggatgattcacaagcatttagaaatatggtatatgtgaggtcgttagctgcaaatttgaatgatgtagtatgcagtggaggttcttacagttttgcgttacctgtaggcaatcatccggtgatgagtggtggtgcagtgaccttaacatctgctggcgtaacactatcaacccagtatacagattatgtatcattaaattcattgcaattcagattcagattggcggtgagcgaaccatcattttccatctcgcgaactagaatgagtggcatatatggattaccagctgtaaatccaaataatagcgcagaatattatgagatagctggtagattctcactcatatcactagtaccaacaaatgatgactatcaaacgccaatcgctaattcagttaccgtaagacaagatttagagagacaattaggcgagttaagagaagaatttaattcgttgtcacaagaaatagctgtttcccaacttatagatctagcaacattaccgcttgatatgttctcaatgttctctggaataaaatcaacggtagaggcagtaaaatctatgactacgaatgtgatgaaaagatttaaaacatcaagtttagcaaacgccatatctgatttaacaagtaatatgtcggaagcggcatcatctgtaagattgacgtcagtgagatcggtgggcactattacattgccaagagctagggtttcattgcaagtgggcgatgacttgaggtccatgcaagacgtatcaacacaagtgtcaaatgtgagtagaaatttaagattgaaagagttcacgacgcaaactgatactttaagctttgatgacatctctgcagctgtattgaagacgaaactagataaatcgacgcaaatttcacaacaaacaatgccagatattatagctgagtcatctgagaagtttataccgaagagatcgtatagaatagttgatgaggatattcgattcgaaactggaattgacggaacgttttatgcttacaaagtcgatacatttaatgaaattccgtttgatatggaacgatttaataaattaataacagattcaccagttttatcagcaataatagactttaagacgttaaagaacttaaacgacaattatggaataacaaagaaacaagccatggaactattacattcaaatccaaagacattaaaagagtttataaataataataatccaataattagaaatagaatcgaaaacttaatatcgcagtgtaggttgtagctgtctattttaagatgtgacc

SEQ ID NO: 172-184 - skipped (13 entries)

SEQ ID NO: 185 - protein, 566 aa, Influenza virus HA
MKTIIALSYILCLVFAQKLPGNDNSTATLCLGHHAVPNGTIVKTITNDQIEVTNATELVQSSSTGGICDSPHQILDGENCTLIDALLGDPQCDGFQNKKWDLFVERSKAYSNCYPYDVPDYASLRSLVASSGTLEFNNESFNWTGVTQNGTSSACKRRSNKSFFSRLNWLTHLKYKYPALNVTMPNNEKFDKLYIWGVLHPGTDSDQISLYAQASGRITVSTKRSQQTVIPNIGSRPRVRDVSSRISIYWTIVKPGDILLINSTGNLIAPRGYFKIRSGKSSIMRSDAPIGKCNSECITPNGSIPNDKPFQNVNRITYGACPRYIKQNTLKLATGMRNVPEKQTRGIFGAIAGFIENGWEGMVDGWYGFRHQNSEGTGQAADLKSTQAAINQINGKLNRLIGKTNEKFHQIEKEFSEVEGRIQDLEKYVEDTKIDLWSYNAELLVALENQHTIDLTDSEMNKLFERTKKQLRENAEDMGNGCFKIYHKCDNACIGSIRNGTYDHDVYRDEALNNRFQIKGVELKSGYKDWILWISFAISCFLLCVALLGFIMWACQKGNIRCNICI

SEQ ID NO: 186 - protein, 662 aa, canine distemper virus
MHKGIPKSSKTQTHTQQDRPPQPSTELEETRTSRARHSTTSAQRSTHYDPRTSDRPVSYTMNRTRSRKQTSHRLKNIPVHGNHEATIQHIPESVSKGARSQIERRQPNAINSGSQCTWLVLWCLGMASLFLCSKAQIHWNNLSTIGIIGTDSVHYKIMTRPSHQYLVIKLMPNVSLIENCTKAELGEYEKLLNSVLEPINQALTLMTKNVKPLQSLGSGRRQRRFAGVVLAGVALGVATAAQITAGIALHQSNLNAQAIQSLRTSLEQSNKAIEEIREATQETVIAVQGVQDYVNNELVPAMQHMSCELVGQRLGLRLLRYYTELLSIFGPSLRDPISAEISIQALIYALGGEIHKILEKLGYSGSDMIAILESRGIKTKITHVDLPGKFIILSISYPTLSEVKGVIVHRLEAVSYNIGSQEWYTTVPRYIATNGYLISNFDESSCVFVSESAICSQNSLYPMSPLLQQCIRGDTSSCARTLVSGTMGNKFILSKGNIVANCASILCKCYSTSTIINQSPDKLLTFIASDTCPLVEIDGATIQVGGRQYPDMVYEGKVALGPAISLDRLDVGTNLGNALKKLDDAKVLIDSSNQILETVRRSSFNFGSLLSVPILSCTALALLLLIYCCKRRYQQTLKQHTKVDPAFKPDLTGTSKSYVRSL

SEQ ID NO: 187 - protein, 907 aa, Cytomegalovirus
MESRIWCLVVCVNLCIVCLGAAVSSSSTRGTSATHSHHSSHTTSAAHSRSGSVSQRVTSSQTVSHGVNETIYNTTLKYGDVVGVNTTKYPYRVCSMAQGTDLIRFERNIVCTSMKPINEDLDEGIMVVYKRNIVAHTFKVRVYQKVLTFRRSYAYIHTTYLLGSNTEYVAPPMWEIHHINSHSQCYSSYSRVIAGTVFVAYHRDSYENKTMQLMPDDYSNTHSTRYVTVKDQWHSRGSTWLYRETCNLNCMVTITTARSKYPYHFFATSTGDVVDISPFYNGTNRNASYFGENADKFFIFPNYTIVSDFGRPNSALETHRLVAFLERADSVISWDIQDEKNVTCQLTFWEASERTIRSEAEDSYHFSSAKMTATFLSKKQEVNMSDSALDCVRDEAINKLQQIFNTSYNQTYEKYGNVSVFETTGGLVVFWQGIKQKSLVELERLANRSSLNLTHNRTKRSTDGNNATHLSNMESVHNLVYAQLQFTYDTLRGYINRALAQIAEAWCVDQRRTLEVFKELSKINPSAILSAIYNKPIAARFMGDVLGLASCVTINQTSVKVLRDMNVKESPGRCYSRPVVIFNFANSSYVQYGQLGEDNEILLGNHRTEECQLPSLKIFIAGNSAYEYVDYLFKRMIDLSSISTVDSMIALDIDPLENTDFRVLELYSQKELRSSNVFDLEEIMREFNSYKQRVKYVEDKVVDPLPPYLKGLDDLMSGLGAAGKAVGVAIGAVGGAVASVVEGVATFLKNPFGAFTIILVAIAVVIIIYLIYTRQRRLCMQPLQNLFPYLVSADGTTVTSGNTKDTSLQAPPSYEESVYNSGRKGPGPPSSDASTAAPPYTNEQAYQMLLALVRLDAEQRAQQNGTDSLDGQTGTQDKGQKPNLLDRLRHRKNGYRHLKDSDEEENV

SEQ ID NO: 188 - protein, 742 aa, Cytomegalovirus
MRPGLPSYLIILAVCLFSHLLSSRYGAEAVSEPLDKAFHLLLNTYGRPIRFLRENTTQCTYNSSLRNSTVVRENAISFNFFQSYNQYYVFHMPRCLFAGPLAEQFLNQVDLTETLERYQQRLNTYALVSKDLASYRSFSQQLKAQDSLGEQPTTVPPPIDLSIPHVWMPPQTTPHGWTESHTTSGLHRPHFNQTCILFDGHDLLFSTVTPCLHQGFYLIDELRYVKITLTEDFFVVTVSIDDDTPMLLIFGHLPRVLFKAPYQRDNFILRQTEKHELLVLVKKDQLNRHSYLKDPDFLDAALDFNYLDLSALLRNSFHRYAVDVLKSGRCQMLDRRTVEMAFAYALALFAAARQEEAGAQVSVPRALDRQAALLQIQEFMITCLSQTPPRTTLLLYPTAVDLAKRALWTPNQITDITSLVRLVYILSKQNQQHLIPQWALRQIADFALKLHKTHLASFLSAFARQELYLMGSLVHSMLVHTTERREIFIVETGLCSLAELSHFTQLLAHPHHEYLSDLYTPCSSSGRRDHSLERLTRLFPDATVPATVPAALSILSTMQPSTLETFPDLFCLPLGESFSALTVSEHVSYIVTNQYLIKGISYPVSTTVVGQSLIITQTDSQTKCELTRNMHTTHSITVALNISLENCAFCQSALLEYDDTQGVINIMYMHDSDDVLFALDPYNEVVVSSPRTHYLMLLKNGTVLEVTDVVVDATDSRLLMMSVYALSAIIGIYLLYRMLKTC

SEQ ID NO: 189 - protein, 676 aa, Ebola virus
MGVTGILQLPRDRFKRTSFFLWVIILFQRTFSIPLGVIHNSTLQVSDVDKLVCRDKLSSTNQLRSVGLNLEGNGVATDVPSATKRWGFRSGVPPKVVNYEAGEWAENCYNLEIKKPDGSECLPAAPDGIRGFPRCRYVHKVSGTGPCAGDFAFHKEGAFFLYDRLASTVIYRGTTFAEGVVAFLILPQAKKDFFSSHPLREPVNATEDPSSGYYSTTIRYQATGFGTNETEYLFEVDNLTYVQLESRFTPQFLLQLNETIYTSGKRSNTTGKLIWKVNPEIDTTIGEWAFWETKKNLTRKIRSEELSFTVVSNGAKNISGQSPARTSSDPGTNTTTEDHKIMASENSSAMVQVHSQGREAAVSHLTTLATISTSPQSLTTKPGPDNSTHNTPVYKLDISEATQVEQHHRRTDNDSTASDTPSATTAAGPPKAENTNTSKSTDFLDPATTTSPQNHSETAGNNNTHHQDTGEESASSGKLGLITNTIAGVAGLITGGRRTRREAIVNAQPKCNPNLHYWTTQDEGAAIGLAWIPYFGPAAEGIYIEGLMHNQDGLICGLRQLANETTQALQLFLRATTELRTFSILNRKAIDFLLQRWGGTCHILGPDCCIEPHDWTKNITDKIDQIIHDFVDKTLPDQGDNDNWWTGWRQWIPAGIGVTGVIIAVIALFCICKFVF

SEQ ID NO: 190 - protein, 852 aa, Human immunodeficiency virus
MRVKEIRRNYQHLWRWGTMLLGILMICSAAEKLWVTVYYGVPVWKEANTTLFCASDAKATKAEVHNVWATHACVPTDPNPQELALENVTEKFDMWKNNMVEQMHEDIISLWDQSLKPCVKLTPLCVTLTCTDYSGNNNTNITGKANTTIDDIEMKNCSFNITTGIRDKVKREYALFYKVDVVPIEKNTSYRLIHCNTSTITQACPKVSFEPIPIHYCAPAGFAILKCKDKKFNGTGLCTNVSTVQCTHGIRPVVSTQLLLNGSLAEEEVVIRSQNFTDNVKTIIVQLNESVVINCTRPNNNTRKSIHIGPGGAFYTTGQVIGNIRQAYCNISEEQWNKTLKYIVEKLREQFGNKTIIFNQSSGGDPEIVTHSFNCGGEFFYCNTSRLFNSTWNITEGSNSTAGSNKNITLPCRIKQIINMWQEVGKAMYAPPISGLIRCTSNITGLLLTRDGGHDNKTNDTEIFRPGGGNMRDNWRSELYKYKVVKIEPLGIAPTKARRRVVQRDKRAVGIGAMFLGILGAAGSTMGAASITLTVQARQLLSGIVQQQNNLLRAIEAQQHLLQLTVWGIKQLQARVLAVERYLKDQQLLGIWGCSGKLICTTNVPWNTSWSNRSLDYIWGNMTWIQWEREIDNYTDLIYTLIEESQDQQEKNELELMKLDKWDSLWSWFSITNWLWYIRLFIIIVGGLVGLRIVFTVLSIVNRVRQGYSPLSFQTRLQAPRGPDRPEGIEEEGGDRDRDRSVRLVDGFLALLWEDLRSLFLFSYRHLRDLLLIVARTVELLGRRGREALKYGWNLLLYWSQELKNSAVSLLNATAITVAEGTDRAIELIQRAFRAFLRIPTRIRQGLERALL

SEQ ID NO: 191 - protein, 838 aa, herpes simplex virus
MGNGLWFVGVIILGAAWGQVHDWTEQTDPWFLDGLGMDRMYWRDTNTGRLWLPNTPDPQKPPRGFLAPPDELNLTTASLPLLRWYEERFCFVLVTTAEFPRDPGQLLYIPKTYLLGRPPNASLPAPTTVEPTAQPPPAVAPLKGLLHNPTASVLLRSRAWVTFSAVPDPEALTFPRGDNVATASHPSGPRDTPPPRPPVGARRHPTTELDITHLHNASTTWLATRGLLRSPGRYVYFSPSASTWPVGIWTTGELVLGCDAALVRARYGREFMGLVISMHDSPPAEVMVVPAGQTLDRVGDPADENPPGALPGPPGGPRYRVFVLGSLTRADNGSALDALRRVGGYPEEGTNYAQFLSRAYAEFFSGDAGAEQGPRPPLFWRLTGLLATSGFAFVNAAHANGAVCLSDLLGFLAHSRALAGLAARGAAGCAADSVFFNVSVLDPTARLQLEARLQHLVAEILEREQSLALHALGYQLAFVLDSPSAYDAVAPSAAHLIDALYAEFLGGRVVTTPVVHRALFYASAVLRQPFLAGVPSAVQRERARRSLLIASALCTSDVAAATNADLRTALARADHQKTLFWLPDHFSPCAASLRFDLDESVFILDALAQATRSETPVEVLAQQTHGLASTLTRWAHYNALIRAFVPEASHRCGGQSANVEPRILVPITHNASYVVTHSPLPRGIGYKLTGVDVRRPLFLTYLTATCEGSTRDIESKRLVRTQNQRDLGLVGAVFMRYTPAGEVMSVLLVDTDNTQQQIAAGPTEGAPSVFSSDVPSTALLLFPNGTVIHLLAFDTQPVAAIAPGFLAASALGVVMITAALAGILKVLRTSVPFFWRRE

SEQ ID NO: 192 - protein, 224 aa, herpes simplex virus
MGILGWVGLIAVGILCVRGGLPSTEYVIRSRVAREVGDILKVPCVPLPSDDLDWRYETPSAINYALIDGIFLRYHCPGLDTVLWDRHAQRAYWVNPFLFGAGFLEDLSHPAFPADTQETETRLALYKEIRQALDSRKQAASHTPVKAGCVNFDYSRTRRCVGRQDLGLTNRTSGRTPVLPSDDEAGLQPKPLTTPSPIIATSDPTPRRDAATKSRRRRPHFRGL

SEQ ID NO: 193 - protein, 576 aa, Influenza virus HA
MKAIPLVLLYTFTAANADTLCIGYHANNSTDTVDTVLEKNVTVTHSVNLLEDRHNGKLCKLGGIAPLHLGKCNIAGWLLGNPECESLSTISSWSYIVETSNSDNGTCYPGDFINYEELREQLSSVSSFERFEIFPKASSWPNHETNGGVTTACPYAGAKSFYRNLIWLVKKGNSYPKLSKSYVNNKGKEVLVLWGIHHPPTSNDQQALYQNADAYVFVGSSKYNKMFKPEIATRPKVRNQTGRMNYYWTLVEPGDTITFEATGNLVVPRYAFAMNRGSESGIIISDTPVHDCNTTCQTPKGAINTSLPFQNVHPATIGECPKYVKSTKLRMATGLRNIPSIQSRGLFGAIAGFIEGGWTGMIDGWYGYHHQNGQGSGYAADQKSTQNAIDGITNKVNSVIEKMNTQFTAVGKEFNHLEKRIENLNKKVDDGFLDVWTYNAELLVLLENERTLDFHDSNVKNLYEKVRSQLRNNAKEIGNGCFEFYHKCDDTCMESVKNGTYDYSKYSEESKLNREVIDGVKLDSTRIYQILAIYSTVASSLVLLVSLGAISFWMCSNGSLQCRICIDFRDMRKNTL

SEQ ID NO: 194 - protein, 580 aa, Influenza virus HA
LSTHGSTSNADRICTGITSSNSPHVVKTATQGEVNVTGVIPLTTTPTKSHFANLKGTETRGKLCPKCLNCTDLDVALGRPKCTGNIPSARVSILHEVRPVTSGCFPIMHDRTKIRQLPKLLRGYEHIRLSTHNVINAENAPGGPYKIGTSGSCPNVTNGNGFFATMAWAVPKNDNNKTATNSLTIEVPYICTEGEDQITVWGFHSDNETQMAKLYGDSKPQKFTSSANGVTTHYVSQIGGFPNQTEDGGLPQSGRIVVDYMVQKSGKTGTITYQRGILLPQKVWCASGRSKVIKGSLPLIGEADCLHEKYGGLNKSKPYYTGEHAKAIGNCPIWVKTPLKLANGTKYRPPAKLLKERGFFGAIAGFLEGGWEGMIAGWHGYTSHGAHGVAVAADLKSTQEAINKITKNLNSLSELEVKNLQRLSGAMDELHNEILELDEKVDDLRADTISSQIELAVLLSNEGIINSEDEHLLALERKLKKMLGPSAVEIGNGCFETKHKCNQTCLDRIAAGTFDAGEFSLPTFDSLNITAASLNDDGLDNHTILLYYSTAASSLAVTLMIAIFVVYMVSRDNVSCSICL

SEQ ID NO: 195 - protein, 565 aa, Influenza virus HA
  misc_feature (144)..(144): Xaa can be any naturally occurring amino acid
  misc_feature (202)..(202): Xaa can be any naturally occurring amino acid
MKVKLLVLLCTFTATYADTICIGYHANNSTDTVDTVLEKNVTVTHSVNLLEDSHNGKLCLLKGIAPLQLGNCSVAGWILGNPECELLISKESWSYIVETPNPENGTCYPGYFADYEELREQLSSVSSFERFEIFPKESSWPNHXVTGVSASCSHNGKSSFYRNLLWLTGKNGLYPNLSKSYANNKEKEVLVLWGVHHPPNIXDQRALYHTENAYVSVVSSHYSRRFTPEIAKRPKVRDQEGRINYYWTLLEPGDTIIFEANGNLIAPRFAFALSRGFGSGIITSNAPMDECDAKCQTPQGAINSSLPFQNVHPVTIGECPKYVRSTKLRMVTGLRNIPSIQSRGLFGAIAGFIEGGWTGMVDGWYGYHHQNEQGSGYAADQKSTQNAINGITNKVNSVIEKMNTQFTAVGKEFNKLERRMENLNKKVDDGFLDIWTYNAELLVLLENERTLDFHDSNVKNLYEKVKSQLKNNAKEIGNGCFEFYHKCNDECMESVKNGTYDYPKYSEESKLNREKIDGVKLESMGVYQILAIYSTVASSLVLLVSLGAISFWMCSNGSLQCRICI

SEQ ID NO: 196 - protein, 566 aa, Influenza virus HA
MKTIIALSYILCLVFAQKLPGNDNSTATLCLGHHAVPNGTIVKTITNDQIEVTNATELVQSSSTGGICDSPHQILDGENCTLIDALLGDPQCDGFQNKKWDLFVERSKAYSNCYPYDVPDYASLRSLVASSGTLEFNNESFNWTGVTQNGTSSACKRGSNKSFFSRLNWLTHLKFKYPALNVTMPNNEKFDKLYIWGVHHPGTDNDQISLYAQASGRITVSTKRSQQTVIPNIGSRPRVRDIPSRISIYWTIVKPGDILLINSTGNLIAPRGYFKIRSGKSSIMRSDAPIGKCNSECITPNGSIPNDKPFQNVNRITYGACPRYVKQNTLKLATGMRNVPEKQTRGIFGAIAGFIENGWEGMVDGWYGFRHQNSEGTGQAADLKSTQAAINQINGKLNRLIGKTNEKFHQIEKEFSEVEGRIQDLEKYVEDTKIDLWSYNAELLVALENQHTIDLTDSEMNKLFERTKKQLRENAEDMGNGCFKIYHKCDNACIGSIRNGTYDHDVYRDEALNNRFQIKGVELKSGYKDWILWISFAISCFLLCVALLGFIMWACQKGNIRCNICI

SEQ ID NO: 197 - protein, 568 aa, Influenza virus HA
MEKIVLLLAIVSLVKSDQICIGYHANNSTEQVDTIMEKNVTVTHAQDILEKTHNGKLCDLNGVKPLILRDCSVAGWLLGNPMCDEFINVPEWSYIVEKASPANDLCYPGDFNDYEELKHLLSRTNHFEKIQIIPKSSWSNHDASSGVSSACPYHGRSSFFRNVVWLIKKNSAYPTIKRSYNNTNQEDLLVLWGIHHPNDAAEQTKLYQNPTTYISVGTSTLNQRLVPEIATRPKVNGQSGRMEFFWTILKPNDAINFESNGNFIAPEYAYKIVKKGDSAIMKSELEYGNCNTKCQTPMGAINSSMPFHNIHPLTIGECPKYVKSNRLVLATGLRNTPQRERRRKKRGLFGAIAGFIEGGWQGMVDGWYGYHHSNEQGSGYAADKESTQKAIDGVTNKVNSIIDKMNTQFEAVGREFNNLERRIENLNKQMEDGFLDVWTYNAELLVLMENERTLDFHDSNVKNLYDKVRLQLRDNAKELGNGCFEFYHKCDNECMESVKNGTYDYPQYSEEARLNREEISGVKLESMGTYQILSIYSTVASSLALAIMVAGLSLWMCSNGSLQCRICI

SEQ ID NO: 198 - protein, 349 aa, Influenza virus HA
ACVLVEAKGDKICLGHHAVVNGTKVNTLTEKGIEVVNATETVETANIGKICTQGKRPTDLGQCGLLGTLIGPPQCDQFLEFESDLIIERREGNDVCYPGKFTNEESLRQILRGSGGIDKESMGFTYSGIITNGATSACRRSGSSFYAEMKWLLSNSDNAAFPQMTKSYRNPRNKPALIVWGIHHSGSTTEQTKLYGSGNKLITVESSKYQQSFTPSPGARPQVNGESGRIDFHWMLLDPNDTVTFTFNGAFIAPDRASFFKGESLGVQSDVPLDSSCGGDCFHSGGTIVSSLPFQNINPRTVGKCPRYVKQPSLLLATGMRNVPENPKTRGLFGAIAGFIEKDGGSHYG

SEQ ID NO: 199 - protein, 560 aa, Influenza virus HA
METISLITILLVVTASNADKICIGHQSTNSTETVDTLTETNVPVTHAKELLHTEHNGMLCATSLGHPLILDTCTIEGLVYGNPSCDLLLGGREWSYIVERSSAVNGTCYPGNVENLEELRTLFSSASSYQRIQIFPDTTWNVTYTGTSRACSGSFYRSMRWLTQKSGFYPVQDAQYTNNRGKSILFVWGIHHPPTYTEQTNLYIRNDTTTSVTTEDLNRTFKPVIGPRPLVNGLQGRIDYYWSVLKPGQTLRVRSNGNLIAPWYGHVLSGGSHGRILKTDLKGGNCVVQCQTEKGGLNSTLPFHNISKYAFGTCPKYVRVNSLKLAVGLRNVPARSSRGLFGAIAGFIEGGWPGLVAGWYGFQHSNDQGVGMAADRDSTQKAIDKITSKVNNIVDKMNKQYEIIDHEFSEVETRLNMINNKIDDQIQDVWAYNAELLVLLENQKTLDEHDANVNNLYNKVKRALGSNAMEDGKGCFELYHKCDDQCMETIRNGTYNRRKYREESRLERQKIEGVKLESEGTYKILTIYSTVASSLVLAMGFAAFLFWAMSNGSCRCNICI

SEQ ID NO: 200 - protein, 546 aa, Nipah virus
MVVILDKRCYCNLLILILMISECSVGILHYEKLSKIGLVKGVTRKYKIKSNPLTKDIVIKMIPNVSNMSQCTGSVMENYKTRLNGILTPIKGALEIYKNNTHDLVGDVRLAGVIMAGVAIGIATAAQITAGVALYEAMKNADNINKLKSSIESTNEAVVKLQETAEKTVYVLTALQDYINTNLVPTIDKISCKQTELSLDLALSKYLSDLLFVFGPNLQDPVSNSMTIQAISQAFGGNYETLLRTLGYATEDFDDLLESDSITGQIIYVDLSSYYIIVRVYFPILTEIQQAYIQELLPVSFNNDNSEWISIVPNFILVRNTLISNIEIGFCLITKRSVICNQDYATPMTNNMRECLTGSTEKCPRELVVSSHVPRFALSNGVLFANCISVTCQCQTTGRAISQSGEQTLLMIDNTTCPTAVLGNVIISLGKYLGSVNYNSEGIAIGPPVFTDKVDISSQISSMNQSLQQSKDYIKEAQRLLDTVNPSLISMLSMIILYVLSIASLCIGLITFISFIIVEKKRNTYSRLEDRRVRPTSSGDLYYIGT

SEQ ID NO: 201 - protein, 574 aa, respiratory syncytial virus
MELLIHRLSAIFLTLAINALYLTSSQNITEEFYQSTCSAVSRGYFSALRTGWYTSVITIELSNIKETKCNGTDTKVKLIKQELDKYKNAVTELQLLMQNTPAANNRARREAPQYMNYTINTTKNLNVSISKKRKRRFLGFLLGVGSAIASGIAVSKVLHLEGEVNKIKNALLSTNKAVVSLSNGVSVLTSKVLDLKNYINNQLLPIVNQQSCRISNIETVIEFQQKNSRLLEINREFSVNAGVTTPLSTYMLTNSELLSLINDMPITNDQKKLMSSNVQIVRQQSYSIMSIIKEEVLAYVVQLPIYGVIDTPCWKLHTSPLCTTNIKEGSNICLTRTDRGWYCDNAGSVSFFPQADTCKVQSNRVFCDTMNSLTLPSEVSLCNTDIFNSKYDCKIMTSKTDISSSVITSLGAIVSCYGKTKCTASNKNRGIIKTFSNGCDYVSNKGVDTVSVGNTLYYVNKLEGKNLYVKGEPIINYYDPLVFPSDEFDASISQVNEKINQSLAFIRRSDELLHNVNTGKSTTNIMITTIIIVIIVVLLSLIAIGLLLYCKAKNTPVTLSKDQLSGINNIAFSK

SEQ ID NO: 202 - protein, 574 aa, respiratory syncytial virus
MELLILKANAITTILTAVTFCFASGQNITEEFYQSTCSAVSKGYLSALRTGWYTSVITIELSNIKENKCNGTDAKVKLIKQELDKYKNAVTELQLLMQSTPATNNRARRELPRFMNYTLNNAKKTNVTLSKKRKRRFLGFLLGVGSAIASGVAVSKVLHLEGEVNKIKSALLSTNKAVVSLSNGVSVLTSKVLDLKNYIDKQLLPIVNKQSCSISNIATVIEFQQKNNRLLEITREFSVNAGVTTPVSTYMLTNSELLSLINDMPITNDQKKLMSNNVQIVRQQSYSIMSIIKEEVLAYVVQLPLYGVIDTPCWKLHTSPLCTTNTKEGSNICLTRTDRGWYCDNAGSVSFFPQAETCKVQSNRVFCDTMNSLTLPSEVNLCNVDIFNPKYDCKIMTSKTDVSSSVITSLGAIVSCYGKTKCTASNKNRGIIKTFSNGCDYVSNKGVDTVSVGNTLYYVNKQEGKSLYVKGEPIINFYDPLVFPSDEFDASISQVNEKINQSLAFIRKSDELLHNVNAGKSTINIMITTIIIVIIVILLSLIAVGLLLYCKARSTPVTLSKDQLSGINNIAFSN

SEQ ID NO: 203 - protein, 1255 aa, SARS virus
MFIFLLFLTLTSGSDLDRCTTFDDVQAPNYTQHTSSMRGVYYPDEIFRSDTLYLTQDLFLPFYSNVTGFHTINHTFGNPVIPFKDGIYFAATEKSNVVRGWVFGSTMNNKSQSVIIINNSTNVVIRACNFELCDNPFFAVSKPMGTQTHTMIFDNAFNCTFEYISDAFSLDVSEKSGNFKHLREFVFKNKDGFLYVYKGYQPIDVVRDLPSGFNTLKPIFKLPLGINITNFRAILTAFSPAQDIWGTSAAAYFVGYLKPTTFMLKYDENGTITDAVDCSQNPLAELKCSVKSFEIDKGIYQTSNFRVVPSGDVVRFPNITNLCPFGEVFNATKFPSVYAWERKKISNCVADYSVLYNSTFFSTFKCYGVSATKLNDLCFSNVYADSFVVKGDDVRQIAPGQTGVIADYNYKLPDDFMGCVLAWNTRNIDATSTGNYNYKYRYLRHGKLRPFERDISNVPFSPDGKPCTPPALNCYWPLNDYGFYTTTGIGYQPYRVVVLSFELLNAPATVCGPKLSTDLIKNQCVNFNFNGLTGTGVLTPSSKRFQPFQQFGRDVSDFTDSVRDPKTSEILDISPCSFGGVSVITPGTNASSEVAVLYQDVNCTDVSTAIHADQLTPAWRIYSTGNNVFQTQAGCLIGAEHVDTSYECDIPIGAGICASYHTVSLLRSTSQKSIVAYTMSLGADSSIAYSNNTIAIPTNFSISITTEVMPVSMAKTSVDCNMYICGDSTECANLLLQYGSFCTQLNRALSGIAAEQDRNTREVFAQVKQMYKTPTLKYFGGFNFSQILPDPLKPTKRSFIEDLLFNKVTLADAGFMKQYGECLGDINARDLICAQKFNGLTVLPPLLTDDMIAAYTAALVSGTATAGWTFGAGAALQIPFAMQMAYRFNGIGVTQNVLYENQKQIANQFNKAISQIQESLTTTSTALGKLQDVVNQNAQALNTLVKQLSSNFGAISSVLNDILSRLDKVEAEVQIDRLITGRLQSLQTYVTQQLIRAAEIRASANLAATKMSECVLGQSKRVDFCGKGYHLMSFPQAAPHGVVFLHVTYVPSQERNFTTAPAICHEGKAYFPREGVFVFNGTSWFITQRNFFSPQIITTDNTFVSGNCDVVIGIINNTVYDPLQPELDSFKEELDKYFKNHTSPDVDLGDISGINASVVNIQKEIDRLNEVAKNLNESLIDLQELGKYEQYIKWPWYVWLGFIAGLIAIVMVTILLCCMTSCCSCLKGACSCGSCCKFDEDDSEPVLKGVKLHYT

SEQ ID NO: 204 - skipped

SEQ ID NO: 205 - protein, 867 aa, Varicella zoster
MFVTAVVSVSPSSFYESLQVEPTQSEDITRSAHLGDGDEIREAIHKSQDAETKPTFYVCPPTGSTIVRLEPTRTCPDYHLGKNFTEGIAVVYKENIAAYKFKATVYYKDVIVSTAWAGSSYTQITNRYADRVPIPVSEITDTIDKFGKCSSKATYVRNNHKVEAFNEDKNPQDMPLIASKYNSVGSKAWHTTNDTYMVAGTPGTYRTGTSVNCIIEEVEARSIFPYDSFGLSTGDIIYMSPFFGLRDGAYREHSNYAMDRFHQFEGYRQRDLDTRALLEPAARNFLVTPHLTVGWNWKPKRTEVCSLVKWREVEDVVRDEYAHNFRFTMKTLSTTFISETNEFNLNQIHLSQCVKEEARAIINRIYTTRYNSSHVRTGDIQTYLARGGFVVVFQPLLSNSLARLYLQELVRENTNHSPQKHPTRNTRSRRSVPVELRANRTITTTSSVEFAMLQFTYDHIQEHVNEMLARISSSWCQLQNRERALWSGLFPINPSALASTILDQRVKARILGDVISVSNCPELGSDTRIILQNSMRVSGSTTRCYSRPLISIVSLNGSGTVEGQLGTDNELIMSRDLLEPCVANHKRYFLFGHHYVYYEDYRYVREIAVHDVGMISTYVDLNLTLLKDREFMPLQVYTRDELRDTGLLDYSEIQRRNQMHSLRFYDIDKVVQYDSGTAIMQGMAQFFQGLGTAGQAVGHVVLGATGALLSTVHGFTTFLSNPFGALAVGLLVLAGLVAAFFAYRYVLKLKTSPMKALYPLTTKGLKQLPEGMDPFAEKPNATDTPIEEIGDSQNTEPSVNSGFDPDKFREAQEMIKYMTLVSAAERQESKARKKNKTSALLTSRLTGLALRNRRGYSRVRTENVTGV

SEQ ID NO: 206 - protein, 661 aa, Varicella zoster
MFYEALKAELVYTRAVHGFRPRANCVVLSDYIPRVACNMGTVNKPVVGVLMGFGIITGTLRITNPVRASVLRYDDFHTDEDKLDTNSVYEPYYHSDHAESSWVNRGESSRKAYDHNSPYIWPRNDYDGFLENAHEHHGVYNQGRGIDSGERLMQPTQMSAQEDLGDDTGIHVIPTLNGDDRHKIVNVDQRQYGDVFKGDLNPKPQGQRLIEVSVEENHPFTLRAPIQRIYGVRYTETWSFLPSLTCTGDAAPAIQHICLKHTTCFQDVVVDVDCAENTKEDQLAEISYRFQGKKEADQPWIVVNTSTLFDELELDPPEIEPGVLKVLRTEKQYLGVYIWNMRGSDGTSTYATFLVTWKGDEKTRNPTPAVTPQPRGAEFHMWNYHSHVFSVGDTFSLAMHLQYKIHEAPFDLLLEWLYVPIDPTCQPMRLYSTCLYHPNAPQCLSHMNSGCTFTSPHLAQRVASTVYQNCEHADNYTAYCLGISHMEPSFGLILHDGGTTLKFVDTPESLSGLYVFVVYFNGHVEAVAYTVVSTVDHFVNAIEERGFPPTAGQPPATTKPKEITPVNPGTSPLLRYAAWTGGLAAVVLLCLVIFLICTAKRMRVKAYRVDKSPYNQSMYYAGLPVDDFEDSESTDTEEEFGNAIGGSHGGSSYTVYIDKTR

SEQ ID NO: 207 - protein, 354 aa, Varicella zoster
MFLIHCLISAVIFYIQVTNALIFKGDHVSLQVNSSLTSILIPMQNDNYTEIKGQLVFIGEQLPTGTNYSGTLELLYADTVAFCFRSVQVIRYDGCPRIRTSAFISCRYKHSWHYGNSTDRISTEPDAGVMLKITKPGINDAGVYVLLVRLDHSRSTDGFILGVNVYTAGSHHNIHGVIYTSPSLQNGYSTRALFQQARLCDLPATPKGSGTSLFQHMLDLRAGKSLEDNPWLHEDVVTTETKSVVKEGIENHVYPTDMSTLPEKSLNDPPENLLIIIPIVASVMILTAMVIVIVISVKRRRIKKHPIYRPNTKTRRGIQNATPESDVMLEAAIAQLATIREESPPHSVVNPFVK

SEQ ID NO: 208 - DNA, 1701 bp, Influenza virus HA
atgaagactatcattgctttgagctacattctatgtctggttttcgctcaaaaacttcccggaaatgacaacagcacggcaacgctgtgccttgggcaccatgcagtaccaaacggaacgatagtgaaaacaatcacgaatgaccaaattgaagttactaatgctactgagctggttcagagttcctcaacaggtggaatatgcgacagtcctcatcagatccttgatggagaaaactgcacactaatagatgctctattgggagaccctcagtgtgatggcttccaaaataagaaatgggacctttttgttgaacgcagcaaagcctacagcaactgttacccttatgatgtgccggattatgcctcccttaggtcactagttgcctcatccggcacactggagtttaacaatgaaagcttcaattggactggagtcactcagaatggaacaagctctgcttgcaaaaggagatctaataaaagtttctttagtagattgaattggttgacccatttaaaatacaaatacccagcattgaacgtgactatgccaaacaatgaaaaatttgacaaattgtacatttggggggttctccacccgggtacggacagtgaccaaatcagcctatatgctcaagcatcaggaagaatcacagtctctaccaaaagaagccaacaaactgtaatcccgaatatcggatctagacccagggtaagggatgtctccagcagaataagcatctattggacaatagtaaaaccgggagacatacttttgattaacagcacagggaatctaattgctcctaggggttacttcaaaatacgaagtgggaaaagctcaataatgagatcagatgcacccattggcaaatgcaattctgaatgcatcactccaaatggaagcattcccaatgacaaaccatttcaaaatgtaaacaggatcacatatggggcctgtcccagatatattaagcaaaacactctgaaattggcaacagggatgcgaaatgtaccagagaaacaaactagaggcatatttggcgcaatcgcgggtttcatagaaaatggttgggagggaatggtggacggttggtacggtttcaggcatcaaaattctgagggcacaggacaagcagcagatctcaaaagcactcaagcagcaatcaaccaaatcaatgggaaactgaataggttaatcgggaaaacaaacgagaaattccatcagattgaaaaagaattctcagaagtagaagggagaattcaggacctcgagaaatatgttgaggacactaaaatagatctctggtcatacaacgcggagcttcttgttgccctggagaaccaacatacaattgatctaactgactcagaaatgaacaaactgtttgaaagaacaaagaagcaactgagggaaaatgctgaggatatgggcaatggttgtttcaaaatataccacaaatgtgacaatgcctgcatagggtcaatcagaaatggaacttatgaccatgatgtatacagagatgaagcattaaacaaccggttccagatcaaaggtgttgagctgaagtcaggatacaaagattggatcctatggatttcctttgccatatcatgttttttgctttgtgttgctttgttggggttcatcatgtgggcctgccaaaaaggcaacattaggtgcaacatttgcatttga

SEQ ID NO: 209 - DNA, 2240 bp, Cytomegalovirus
caatcagcatgtcttgagcatgcggtagagcagatagatgccgatgatggccgatagcgcgtagacggacatcatgaggagacgactgtcggtggcgtccacgacgacgtcagttacttctagtaccgtaccgtttttcaaaagcatgaggtagtgagttcgcggagatgagaccaccacttcgttgtagggatccagggcgaaaaggacgtcgtccgagtcgtgcatgtacatgatgttgatgacgccttgcgtgtcgtcgtattctagcagggcgctttggcaaaaggcgcagttttctagcgaaatgttgagcgccactgtgatgctgtgtgtggtatgcatgttgcgcgtcagttcgcatttagtttgactgtccgtctgggtgatgatgaggctctggcctacgacggtggtggagacagggtaggagatacctttgatcaggtactggtttgttacgatataactgacgtgttcggagacggtcagcgcggagaaggattcgccgagcggcaagcaaaacaggtcggggaaggtttccagcgtgcttggttgcatggtagataggatggagagggcggcgggaacggtagcggggacggtggcatcggggaagagacgcgtgaggcgttcgagcgagtgatcgcgtcgcccgctactggaacagggtgtgtacaggtcgctgaggtattcgtggtgtggatgagctaacaactgcgtaaagtgtgatagctcggccaatgaacagaggcccgtttctacgatgaagatttcgcgtctctccgtcgtatgtaccagcatggagtggacgaggctgcccatgaggtagagttcttggcgtgcgaaggctgaaagaaaagaggccaggtgcgttttgtgtagttttagggcaaagtcggcgatctgtcgtagtgcccattgggggatgagatgttgctgattctgtttagagagtatgtagaccaggcgtacgaggctggtgatgtcggtgatctgattcggtgtccaaagggctcgtttggccaggtccacggccgtgggatacagcagcaacgtggtgcgtggtggtgtttgtgagaggcaggtgatcataaattcttgtatttgtaagagtgcggcctggcggtctagggcccgtgggacggagacttgggcgccggcctcttcttgtcgggctgctgcgaacagtgctaatgcgtaggcgaaggccatttctaccgtgcggcggtccagcatctgacatcgaccgctcttgagtacatccacggcgtaacggtgaaagctgttacgtagtagtgcgctgaggtctaggtagttgaagtcaagtgcggcgtcaagaaagtccgggtctttgagataagagtgacggttcagttgatctttcttaactagcaccaggagctcgtgtttttcagtttgtcgtagtataaagttgtcgcgttgatagggcgctttgaaaagtacgcgtggaagatggccgaagataagcagcatgggtgtgtcgtcgtctatggacaccgtaactacgaagaagtcctcggtcagtgttattttaacgtaacgtagttcgtcgatgaggtaaaagccttggtgcaaacaaggtgtgacggtgctgaatagtagatcgtgtccatcaaagaggatacaggtctggttaaagtgtggtcggtgtagtcctgaggtggtatgtgattctgtccagccgtgtggagtggtttgcggtggcatccaaacgtgaggtattgacaggtcaatgggcggtggcacagtggtgggctgttcacctaggctgtcttgtgcctttagctgctgcgaaaaagatcggtagctggccaggtctttggataccagcgcgtaagtgttaagtctctgttggtatctttccagggtttcggtcagatctacctggttcagaaactgctccgccagaggacccgcaaaaagacatcgaggcatatggaatacatagtattgattatagctttggaaaaagttgaaactgatggcgttttccctgacgaccgtgctgttacggaggctgctgttgtaggtacactgggtggtattttcacgcaggaagcggatgggtctcccgtaggtgttgagcagtaggtgaaacgctttgtccagcggttcggatacggcttctgcgccatatcgtgacgaaagtaggtggctgaagagacagacggcgaggatgatgaggtaggaggggaggcctggccgcatagcgcggc

SEQ ID NO: 210 - DNA, 2506 bp, Ebola virus
gatgaagattaagccgacagtgagcgtaatcttcatctctcttagattatttgttttccagagtaggggtcgtcaggtccttttcaatcgtgtaaccaaaataaactccactagaaggatattgtggggcaacaacacaatgggcgttacaggaatattgcagttacctcgtgatcgattcaagaggacatcattctttctttgggtaattatccttttccaaagaacattttccatcccacttggagtcatccacaatagcacattacaggttagtgatgtcgacaaactagtttgtcgtgacaaactgtcatccacaaatcaattgagatcagttggactgaatctcgaagggaatggagtggcaactgacgtgccatctgcaactaaaagatggggcttcaggtccggtgtcccaccaaaggtggtcaattatgaagctggtgaatgggctgaaaactgctacaatcttgaaatcaaaaaacctgacgggagtgagtgtctaccagcagcgccagacgggattcggggcttcccccggtgccggtatgtgcacaaagtatcaggaacgggaccgtgtgccggagactttgccttccataaagagggtgctttcttcctgtatgatcgacttgcttccacagttatctaccgaggaacgactttcgctgaaggtgtcgttgcatttctgatactgccccaagctaagaaggacttcttcagctcacaccccttgagagagccggtcaatgcaacggaggacccgtctagtggctactattctaccacaattagatatcaggctaccggttttggaaccaatgagacagagtacttgttcgaggttgacaatttgacctacgtccaacttgaatcaagattcacaccacagtttctgctccagctgaatgagacaatatatacaagtgggaaaaggagcaataccacgggaaaactaatttggaaggtcaaccccgaaattgatacaacaatcggggagtgggccttctgggaaactaaaaaaacctcactagaaaaattcgcagtgaagagttgtctttcacagttgtatcaaacggagccaaaaacatcagtggtcagagtccggcgcgaacttcttccgacccagggaccaacacaacaactgaagaccacaaaatcatggcttcagaaaattcctctgcaatggttcaagtgcacagtcaaggaagggaagctgcagtgtcgcatctaacaacccttgccacaatctccacgagtccccaatccctcacaaccaaaccaggtccggacaacagcacccataatacacccgtgtataaacttgacatctctgaggcaactcaagttgaacaacatcaccgcagaacagacaacgacagcacagcctccgacactccctctgccacgaccgcagccggacccccaaaagcagagaacaccaacacgagcaagagcactgacttcctggaccccgccaccacaacaagtccccaaaaccacagcgagaccgctggcaacaacaacactcatcaccaagataccggagaagagagtgccagcagcgggaagctaggcttaattaccaatactattgctggagtcgcaggactgatcacaggcgggagaagaactcgaagagaagcaattgtcaatgctcaacccaaatgcaaccctaatttacattactggactactcaggatgaaggtgctgcaatcggactggcctggataccatatttcgggccagcagccgagggaatttacatagaggggctaatgcacaatcaagatggtttaatctgtgggttgagacagctggccaacgagacgactcaagctcttcaactgttcctgagagccacaactgagctacgcaccttttcaatcctcaaccgtaaggcaattgatttcttgctgcagcgatggggcggcacatgccacattctgggaccggactgctgtatcgaaccacatgattggaccaagaacataacagacaaaattgatcagattattcatgattttgttgataaaacccttccggaccagggggacaatgacaattggtggacaggatggagacaatggataccggcaggtattggagttacaggcgttataattgcagttatcgctttattctgtatatgcaaatttgtcttttagtttttcttcagattgcttcatggaaaagctcagcctcaaatcaatgaaaccaggatttaattatatggattacttgaatctaagattacttgacaaatgataatataatacactggagctttaaacatagccaatgtgattctaactcctttaaactcacagttaatcataaacaaggtttgacatcaatctagttatctctttgagaatgataaacttgatgaagattaagaaaaaggtaatctttcgattatctttaatcttcatccttgattctacaatcatgacagttgtctttagtgacaagggaaagaagcctttttattaagttgtaata

SEQ ID NO: 211 - DNA, 2470 bp, Human immunodeficiency virus
tgtgggtcacagtctattatggggtaccagtgtggaaagaagcaaacaccactctattttgtgcatcagatgctaaagcaactaaggcagaggtacataatgtttgggctacacatgcctgtgtacccacggaccccaacccacaagaactagcattggaaaatgtgacagaaaagtttgacatgtggaaaaataacatggtagaacagatgcatgaggatataatcagtttatgggatcaaagcctaaagccatgtgtaaaattaaccccactctgtgttaccttaacttgtactgattattcggggaataataatactaatatcactgggaaggctaataccactattgatgatatagaaatgaaaaattgctctttcaatattaccacaggcataagagataaggtgaagagagaatatgcactgttttataaagttgatgtagtaccaatagagaagaataccagttataggttgatacattgtaacacctcaaccatcacacaggcctgtccaaaggtatcctttgagccaattcccatacattactgtgccccggctggttttgcgattctaaagtgtaaagataagaagttcaatggaacaggactatgtacaaatgtcagcacagtacagtgtacacatggaattaggccagtagtgtcaactcaactgctgttaaatggtagtctagcagaagaagaggtagtaattagatctcagaatttcacagacaatgtcaaaaccataatagtacagctgaatgaatctgtagtgattaattgtacaagacccaacaataatacaagaaaaagtatacatataggaccagggggagcattctatacaacaggacaagtaataggaaatataagacaggcatattgcaacattagtgaagaacaatggaataaaactttaaaatacatagttgaaaaattaagagaacaatttggaaataaaacaataatctttaatcaatcctcaggaggggatccagaaattgtaacgcacagttttaattgtggaggagaattcttctactgtaatacatcacggctgtttaatagtacttggaatattactgaagggtcaaatagcactgcaggctctaacaagaatatcacactcccatgcaggataaaacaaattataaacatgtggcaggaagtaggaaaagcaatgtatgcccctcccatcagcggactaattagatgtacatcaaatattacagggctgttactaacaagagatggtggtcatgataataaaacaaatgacaccgagatcttcagacctggaggaggaaacatgagggacaattggagaagtgaattatataaatataaagtagtaaaaattgaaccattaggaatagcacccaccaaggcaaggagaagagtggtgcaaagagacaaaagagcagtgggaataggagctatgttccttgggatcttaggagcagcaggaagcactatgggcgcagcgtcaataacgctgacggtacaggccagacaactattgtctggtatagtgcaacagcagaacaatttgctgagggccattgaggcgcaacagcatctgttgcaactcacagtctggggcataaagcaactccaggcaagagtcctggctgtggaaagatacctaaaggatcaacagctcctagggatttggggatgctctggaaaactcatctgcaccactaatgtgccttggaatactagttggagtaatagatctctggactatatttgggggaacatgacctggatacagtgggaaagggaaattgacaattacacagacttaatatacaccttaattgaagaatcgcaagaccaacaagaaaagaatgaactagaattaatgaaactagataagtgggacagtctgtggagttggtttagcataacaaactggctgtggtatataagattattcataattatagtaggaggcttagtaggtttaagaatagtttttactgtactttctatagtgaatagagttaggcagggatactcaccattgtcatttcagacccgcctccaagcccccaggggacccgacaggcccgaaggaatcgaagaagaaggtggagacagagacagagacagatccgtgcgcttagtggatggattcttagcacttctctgggaagatctgaggagcctgttcctcttcagctaccgccacttgagagacttactcttgattgtagcgaggactgtggaacttctgggacgcagggggagggaagccctcaaatacgggtggaatcttctgctgtattggagtcaggaactaaagaatagtgctgttagtttgctcaatgctacagctataacagtagctgaggggacagatagggctatagaactaatacaaagagcttttagggcttttcttcgcatacctacaagaataagacagggcttggaaagggctttgctataaaatgggtg

SEQ ID NO: 212 - DNA, 2517 bp, herpes simplex virus
atggggaatggtttatggttcgtgggggttattattttgggcgctgcgtggggtcaggtccacgactggactgagcagacagatccatggtttttggatggcctgggcatggaccgcatgtactggcgcgacacgaacaccgggcgtctgtggctgccaaacacccccgacccccaaaaaccaccgcgcggatttctggcgccgccggacgaactaaacctgactacggcatctctgccccttcttcgctggtacgaggagcgcttttgttttgtattggtcaccacggccgagtttccgcgggaccccggccagctgctttacatcccgaagacctacctgctcggccggcccccgaacgcgagcctgcccgcccccaccacggtcgagccgaccgcccagcctccccccgcggtcgccccccttaagggtctcttgcacaatccaaccgcctccgtgttgctgcgttcccgggcctgggtaacgttttcggccgtccctgaccccgaggccctgacgttcccgcggggagacaacgtggcgacagcgagccacccgagcgggccgcgtgatacaccgcccccccgaccgccggttggggcccggcggcatccgacgacggagctggacatcacgcacctgcacaacgcgtccacgacctggttggccacccggggcctgttgagatccccaggtaggtacgtgtatttctccccgtcggcctcgacgtggcccgtgggcatctggacgacgggggagctggtgctcgggtgcgatgccgcgctggtgcgcgcgcgctacgggcgggaattcatggggctcgtgatatccatgcacgacagccctccggcggaagtgatggtggtccccgcgggccagacgctagatcgggtcggggaccccgcggacgaaaaccccccgggggctcttcccgggcccccgggcggcccccggtatcgggtctttgtcctagggtccctgacgcgggccgacaacggctccgcgctggacgccctccgccgcgtgggcggctacccggaggagggcacgaactacgcccagttcctgtcgcgggcatacgcggagtttttctcgggggacgcgggcgccgagcagggcccgcgcccccctctcttctggcgcctaacggggctgctcgcgacgtcgggttttgctttcgtgaacgccgcccacgcaaacggcgcggtctgcctctccgacctgctaggctttttggcccactcgcgcgcgcttgccgggttggccgcccgcggggccgcgggctgtgccgcggattctgtgttttttaatgtgtcagtcttggatcccacggcccgcctgcagctagaggctcggctccagcacctggtggccgagattctggagcgcgaacagagcttggcattacacgcgctgggctatcagctggccttcgtgctggatagcccctcggcgtacgacgcagtggcgcccagcgcagcccatctcatcgacgccctgtatgccgagtttctagggggccgcgtcgtgaccaccccggtcgtccaccgggcgctattttacgcctcggctgtcctccggcagccgttcttggcgggcgtcccctcggcggtgcagcgggaacgcgcccgccggagccttctgatagcctcggccctgtgtacgtccgacgtcgccgcagcgaccaacgccgacctccggaccgcgctggcccgggccgaccaccagaaaaccctcttttggcttccggaccacttttcgccatgcgcggcctccctgcgctttgatctagacgagagcgtgtttatcctggacgcgctggctcaagccacccgatccgagaccccggtcgaagtcctggcccagcagacccacggcctcgcctcgaccctgacgcgctgggcacactacaacgccctgatccgcgccttcgtccctgaggcctcacatcggtgcggggggcagtctgccaacgtcgagccacggatcctggtacccatcacccacaacgccagctacgtcgtcacccactcccctctgccccgggggatcggctacaagctcaccggcgtcgacgtccgacgcccactgttcctaacctacctcaccgcgacatgcgaaggctccacccgggatatcgagtccaagcggctggtgcgcacccaaaaccagcgcgacctggggctcgtgggggccgtgtttatgcgctacaccccggccggggaggtcatgtctgtgttgttggtggatacggacaacacacagcagcaaatcgccgccgggccgacggagggcgccccaagcgtgttttcgagcgacgtgccgtccacggccttgttgctatttccaaacggaaccgtcattcatttgctagcctttgacacgcagcccgtggccgcaattgcgcccgggtttctggccgcctctgcgctgggcgtggttatgattaccgccgccctggctggcatcctaaaggttctccggacaagtgtcccgtttttttggagacgcgaataa

SEQ ID NO: 213 - DNA, 675 bp, herpes simplex virus
atggggattttgggttgggtcgggcttattgccgttgggattttgtgtgtgcgggggggcttgccttcaaccgaatatgttattcggagtcgggtggctcgagaggtgggggatatattaaaggtgccttgtgtgccgctcccgtctgacgatcttgattggcgctacgagaccccctcggctataaactatgctttgatagacggtatatttttgcgttatcactgtcccggattggacacggtcttgtgggataggcacgcccagagggcgtattgggttaacccctttttgtttggggcgggttttttggaggacttgagtcatcccgcgtttcctgccgacacccaggaaacagaaacgcgcttggccctttataaagagatacgccaggcgctggacagtcgcaagcaggccgccagccacacacctgtgaaggctgggtgtgtgaactttgactattcgcgcacccgccgctgtgtagggcgccaggatttgggacttaccaacagaacgtctggacggaccccggttctgccgtcggacgatgaagcgggcctgcagccgaagcccctcaccacgccgtcgcccatcatcgccacgtcggaccccaccccgcgacgggacgccgccacaaaaagcagacgccgacgaccccacttccggggcctttaa

SEQ ID NO: 214 - protein, 584 aa, Influenza B virus
MKAIIVLLMVVTSNADRICTGITSSNSPHVVKTATQGEVNVTGVIPLTTTPTKSHFANLKGTQTRGKLCPNCFNCTDLDVALGRPKCMGNTPSAKVSILHEVKPATSGCFPIMHDRTKIRQLPNLLRGYENIRLSTSNVINTETAPGGPYKVGTSGSCPNVANGNGFFNTMAWVIPKDNNKTAINPVTVEVPYICSEGEDQITVWGFHSDDKTQMERLYGDSNPQKFTSSANGVTTHYVSQIGGFPNQTEDEGLKQSGRIVVDYMVQKPGKTGTIVYQRGILLPQKVWCASGRSKVIKGSLPLIGEADCLHEKYGGLNKSKPYYTGEHAKAIGNCPIWVKTPLKLANGTKYRPPAKLLKERGFFGAIAGFLEGGWEGMIAGWHGYTSHGAHGVAVAADLKSTQEAINKITKNLNYLSELEVKNLQRLSGAMNELHDEILELDEKVDDLRADTISSQIELAVLLSNEGIINSEDEHLLALERKLKKMLGPSAVEIGNGCFETKHKCNQTCLDRIAAGTFNAGDFSLPTFDSLNITAASLNDDGLDNHTILLYYSTAASSLAVTLMIAIFIVYMVSRDNVSCSICL

SEQ ID NO: 215 - DNA, 1836 bp, Influenza virus HA
ttgtctactcatggtagtacatccaatgcagatcgaatctgcactgggataacatcgtcaaactcaccacatgttgtcaaaactgctactcaaggggaggtcaatgtgactggtgtaataccactgacaacaacacccaccaaatctcattttgcaaatctcaaaggaacagaaaccagagggaaactatgcccaaaatgcctcaactgcacagatctggacgtggccttgggcagaccaaaatgcacggggaacataccctcggcaagagtttcaatactccatgaagtcagacctgttacatctgggtgctttcctataatgcacgacagaacaaaaattagacagctgcctaaacttctcagaggatacgaacatatcaggttatcaactcataacgttatcaatgcagaaaatgcaccaggaggaccctacaaaattggaacctcagggtcttgccctaacgttaccaatggaaacggatttttcgcaacaatggcttgggccgtcccaaaaaacgacaacaacaaaacagcaacaaattcattaacaatagaagtaccatacatttgtacagaaggagaagaccaaattaccgtttgggggttccactctgataacgaaacccaaatggcaaagctctatggggactcaaagccccagaagttcacctcatctgccaacggagtgaccacacattacgtttcacagattggtggcttcccaaatcaaacagaagacggaggactaccacaaagtggtagaattgttgttgattacatggtgcaaaaatctgggaaaacaggaacaattacctatcaaagaggtattttattgcctcaaaaagtgtggtgcgcaagtggcaggagcaaggtaataaaaggatccttgcctttaattggagaagcagattgcctccacgaaaaatacggtggattaaacaaaagcaagccttactacacaggggaacatgcaaaggccataggaaattgcccaatatgggtgaaaacacccttgaagctggccaatggaaccaaatatagacctcctgcaaaactattaaaggaaaggggtttcttcggagctattgctggtttcttagaaggaggatgggaaggaatgattgcaggttggcacggatacacatcccatggggcacatggagtagcggtggcagcagaccttaagagcactcaagaggccataaacaagataacaaaaaatctcaactctttgagtgagctggaagtaaagaatcttcaaagactaagcggtgccatggatgaactccacaacgaaatactagaactagacgagaaagtggatgatctcagagctgatacaataagctcacaaatagaactcgcagtcctgctttccaatgaaggaataataaacagtgaagatgagcatctcttggcgcttgaaagaaagctgaagaaaatgctgggcccctctgctgtagagatagggaatggatgctttgaaaccaaacacaagtgcaaccagacctgtctcgacagaatagctgctggtacctttgatgcaggagaattttctctccccacttttgattcactgaatattactgctgcatctttaaatgacgatggattggataatcatactatactgctttactactcaactgctgcctccagtttggctgtaacattgatgatagctatctttgttgtttatatggtctccagagacaatgtttcttgctccatctgtctataaggaaagttaaaccctgtattttcctttattgtagtgcttgtttgcttgttaccattacaaaaaacgttattgaaaaatgctcttgttactact

SEQ ID NO: 216 - DNA, 1698 bp, Influenza virus HA
atgaaagtaaaactactggttctgttatgtacatttacagctacatatgcagacacaatatgtataggctaccatgccaacaactcgaccgacactgttgacacagtacttgagaagaatgtgacagtgacacactctgtcaacctacttgaggacagtcacaatggaaaactatgtctactaaaaggaatagccccactacaattgggtaattgcagcgttgccggatggatcttaggaaacccagaatgcgaattactgatttccaaggaatcatggtcctacattgtagagacaccaaatcctgagaatggaacatgttacccagggtatttcgccgactatgaggagctgagagagcaattgagttcagtatcttcatttgagaggttcgaaatattccccaaagagagctcatggcccaaccacaycgtaaccggagtatcagcatcatgctcccataacgggaaaagcagtttttacagaaatttgctatggctgacggggaagaatggtttgtatccaaacctgagcaagtcctatgcaaacaacaaagagaaagaagtccttgtactgtggggtgttcatcacccgcctaacatargggaccaaagggccctctatcatacagaaaatgcttatgtctctgtagtgtcttcacattatagcagaagattcaccccagaaatagccaaaagacccaaggtgagagatcaggaaggaagaatcaactactactggactctgcttgaacccggggatacaataatatttgaggcaaatggaaatctaatagcgccaaggtttgctttcgcactgagtagaggctttggatcaggaatcatcacctcaaatgcaccaatggatgaatgtgatgcgaaatgtcaaacacctcagggagctataaacagcagtcttcctttccagaatgtacacccagtcacaataggagagtgtccaaagtatgtcaggagtacaaaattaagaatggttacaggactaaggaacatcccatccattcaatccagaggtttgtttggagccattgccggtttcattgaaggggggtggactggaatggtagatggatggtatggttaccaccatcagaatgagcaaggatctgggtatgctgctgatcaaaaaagcacacaaaatgccattaacgggattacaaacaaggtgaattctgtaattgagaaaatgaacactcaattcacagctgtgggcaaagaattcaacaaattggaaagaaggatggaaaacttaaataaaaaagttgatgatgggtttctagacatttggacatataacgcagaattgttggttctactggaaaatgaaaggactttggactttcatgactccaacgtgaagaatctgtatgagaaagtaaaaagccaattaaagaataatgccaaagaaataggaaacgggtgttttgaattctatcacaagtgtaacgatgaatgcatggagagtgtgaaaaatggaacttatgactatccaaaatattccgaagaatcaaagttgaacagggagaaaattgatggagtgaaattggaatcaatgggagtctatcagattttggcgatctactcaacagtcgccagttccctggttcttttggtctccctgggggcaatcagcttctggatgtgttccaatgggtctttgcagtgtagaatatgcatctaa

SEQ ID NO: 217 - DNA, 1706 bp, Influenza virus HA
atgaagactatcattgctttgagctacattctatgtctggttttcgctcaaaaacttcccggaaatgacaacagcacggcaacgctgtgccttgggcaccatgcagtaccaaacggaacaatagtgaaaacaatcacgaatgaccaaattgaagttactaatgctactgagctggttcagagttcctcaacaggtggaatatgcgacagtcctcatcagatccttgatggagaaaactgcacactaatagatgctctattgggagaccctcagtgtgatggcttccaaaataagaaatgggacctttttgttgaacgcagcaaagcctacagcaactgttacccttatgatgtgccggattatgcctcccttaggtcactagttgcctcatccggcacactggaatttaacaatgaaagcttcaattggactggagtcactcaaaatggaacaagctctgcttgcaaaaggggatctaataaaagtttctttagtagattgaattggttgacccacttaaaattcaaatacccagcattgaacgtgactatgccaaacaatgaaaaatttgacaaattgtacatttggggggttcaccacccgggtacggacaatgaccaaatcagcctatatgctcaagcatcaggaagaatcacagtctctaccaaaagaagccaacaaactgtaatcccgaatatcggatctagacccagggtaagggatatccccagcagaataagcatctattggacaatagtaaaaccgggagacatacttttgattaacagcacagggaatctaattgctcctcggggttacttcaaaatacgaagtgggaaaagctcaataatgagatcagatgcacccattggcaaatgcaattctgaatgcatcactccaaatggaagcattcccaatgacaaaccatttcaaaatgtaaacaggatcacatatggggcctgtcccagatatgttaagcaaaacactctgaaattggcaacagggatgcgaaacgtaccagagaaacaaactagaggcatatttggcgcaatcgcgggtttcatagaaaatggttgggagggaatggtggacggttggtacggtttcaggcatcaaaattctgagggaacaggacaagcagcagatctcaaaagcactcaagcagcaatcaaccaaatcaatgggaagctgaataggttgatcgggaaaacaaacgaaaaattccatcagattgaaaaagaattctcagaagtagaagggagaattcaggacctcgagaaatatgttgaggacactaaaatagatctctggtcatacaacgcggagcttcttgttgccctggagaaccaacatacaattgatctaactgactcagaaatgaacaaactgtttgaaagaacaaagaagcaactgagggaaaatgctgaggatatgggcaatggttgtttcaaaatataccacaaatgtgacaatgcctgcatagggtcaatcagaaatggaacttatgaccatgatgtatacagagatgaagcattaaacaaccggttccagatcaaaggtgttgagctgaagtcaggatacaaagattggatcctatggatttcctttgccatatcatgttttttgctttgtgttgctttgttggggttcatcatgtgggcctgccaaaaaggcaacattaggtgcaacatttgcatttgagtgca

SEQ ID NO: 218 - DNA, 1760 bp, Influenza virus HA
gcaggggtataatctgtcaaaatggagaaaatagtgcttcttcttgcaatagtcagtcttgtcaaaagtgatcagatttgcattggttaccatgcaaacaactcgacagagcaggttgacacaataatggaaaagaacgttactgttacacatgcccaagacatactggaaaagacacacaatgggaagctctgcgatctaaatggagtgaagcctctcattttgagagattgtagtgtagctggatggctcctcggaaaccctatgtgtgacgaattcatcaatgtgccggaatggtcttacatagtggagaaggccagtccagccaatgacctctgttacccaggggatttcaacgactatgaagaactgaaacacctattgagcagaacaaaccattttgagaaaattcagatcatccccaaaagttcttggtccaatcatgatgcctcatcaggggtgagctcagcatgtccataccatgggaggtcctcctttttcagaaatgtggtatggcttatcaaaaagaacagtgcatacccaacaataaagaggagctacaataataccaaccaagaagatcttttagtactgtgggggattcaccatcctaatgatgcggcagagcagacaaagctctatcaaaacccaaccacttacatttccgttggaacatcaacactgaaccagagattggttccagaaatagctactagacccaaagtaaacgggcaaagtggaagaatggagttcttctggacaattttaaagccgaatgatgccatcaatttcgagagtaatggaaatttcattgctccagaatatgcatacaaaattgtcaagaaaggggactcagcaattatgaaaagtgaattggaatatggtaactgcaacaccaagtgtcaaactccaatgggggcgataaactctagtatgccattccacaacatacaccccctcaccatcggggaatgccccaaatatgtgaaatcaaacagattagtccttgcgactggactcagaaatacccctcagagagagagaagaagaaaaaagagaggactatttggagctatagcaggttttatagagggaggatggcagggaatggtagatggttggtatgggtaccaccatagcaatgagcaggggagtggatacgctgcagacaaagaatccactcaaaaggcaatagatggagtcaccaataaggtcaactcgatcattgacaaaatgaacactcagtttgaggccgttggaagggaatttaataacttggaaaggaggatagagaatttaaacaagcagatggaagacggattcctagatgtctggacttataatgctgaacttctggttctcatggaaaatgagagaactctagactttcatgactcaaatgtcaagaacctttatgacaaggtccgactacagcttagggataatgcaaaggagctgggtaatggttgtttcgagttctatcacaaatgtgataatgaatgtatggaaagtgtaaaaaacggaacgtatgactacccgcagtattcagaagaagcaagactaaacagagaggaaataagtggagtaaaattggaatcaatgggaacttaccaaatactgtcaatttattcaacagtggcgagttccctagcactggcaatcatggtagctggtctatctttatggatgtgctccaatggatcgttacaatgcagaatttgcatttaaatttgtgagttcagattgtagttaaaaacacc

SEQ ID NO: 219 - DNA, 1049 bp, Influenza virus HA
ttgcttgtgtgctggttgaagctaagggagacaaaatatgccttgggcaccatgctgtggtaaatgggacaaaggtgaacacgctaacagagaaggggattgaagtagtgaatgctacggagacggtagaaactgcgaatatcgggaaaatctgcacccaagggaaaaggccaaccgacctgggacaatgtggactcctaggaaccctaataggacctccccaatgtgatcagttcctggagtttgaatctgatttaataattgagcgaagagaaggaaatgatgtgtgctatcctgggaaattcacaaatgaggaatcactaaggcagatccttcgagggtcaggaggaatcgataaagagtcgatgggtttcacatatagtggaataataaccaatggagcaacaagtgcttgcagaagatcaggttcttccttctatgcggagatgaagtggttgctgtcaaattctgacaatgcagcattcccccaaatgaccaaatcatatagaaatcccagaaacaaaccagccctaatagtttggggaattcatcattctggatcgactactgagcagaccaaactctatggaagtggaaacaagttgataactgtagaaagctcgaaatatcagcaatcgttcaccccgagtccgggagcacggccacaagtaaatggagagtctgggagaatcgatttccattggatgcttcttgatcccaacgacacagtgactttcaccttcaatggggcattcatagcccctgacagagcaagtttcttcaaaggagaatcactaggagtccagagtgatgttcccttagactctagttgtggaggggattgctttcacagtggaggtacaatagtcagttctctgccattccaaaacattaaccctagaacagtgggaaaatgcccccgatatgtcaaacagccaagcctccttttggctactggaatgaggaatgtcccagagaatccaaagaccagaggactttttggagcaattgccggattcatagagaaggatggagggtctcattacggg

SEQ ID NO: 220 - DNA, 1714 bp, Influenza virus HA
gcaaaagcaggggaattacttaactagcaaaatggaaacaatatcactaataactatactactagtagtaacagcaagcaatgcagataaaatctgcatcggccaccagtcaacaaactccacagaaactgtggacacgctaacagaaaccaatgttcctgtgacacatgccaaagaattgctccacacagagcataatggaatgctgtgtgcaacaagcctgggacatcccctcattctagacacatgcactattgaaggactagtctatggcaacccttcttgtgacctgctgttgggaggaagagaatggtcctacatcgtcgaaagatcatcagctgtaaatggaacgtgttaccctgggaatgtagaaaacctagaggaactcaggacactttttagttccgctagttcctaccaaagaatccaaatcttcccagacacaacctggaatgtgacttacactggaacaagcagagcatgttcaggttcattctacaggagtatgagatggctgactcaaaagagcggtttttaccctgttcaagacgcccaatacacaaataacaggggaaagagcattcttttcgtgtggggcatacatcacccacccacctataccgagcaaacaaatttgtacataagaaacgacacaacaacaagcgtgacaacagaagatttgaataggaccttcaaaccagtgatagggccaaggccccttgtcaatggtctgcagggaagaattgattattattggtcggtactaaaaccaggccaaacattgcgagtacgatccaatgggaatctaattgctccatggtatggacacgttctttcaggagggagccatggaagaatcctgaagactgatttaaaaggtggtaattgtgtagtgcaatgtcagactgaaaaaggtggcttaaacagtacattgccattccacaatatcagtaaatatgcatttggaacctgccccaaatatgtaagagttaatagtctcaaactggcagtcggtctgaggaacgtgcctgctagatcaagtagaggactatttggagccatagctggattcatagaaggaggttggccaggactagtcgctggctggtatggtttccagcattcaaatgatcaaggggttggtatggctgcagatagggattcaactcaaaaggcaattgataaaataacatccaaggtgaataatatagtcgacaagatgaacaagcaatatgaaataattgatcatgaattcagtgaggttgaaactagactcaatatgatcaataataagattgatgaccaaatacaagacgtatgggcatataatgcagaattgctagtactacttgaaaatcaaaaaacactcgatgagcatgatgcgaacgtgaacaatctatataacaaggtgaagagggcactgggctccaatgctatggaagatgggaaaggctgtttcgagctataccataaatgtgatgatcagtgcatggaaacaattcggaacgggacctataataggagaaagtatagagaggaatcaagactagaaaggcagaaaatagagggggttaagctggaatctgagggaacttacaaaatcctcaccatttattcgactgtcgcctcatctcttgtgcttgcaatggggtttgctgccttcctgttctgggccatgtccaatggatcttgcagatgcaacatttgtatataa

SEQ ID NO: 221 - DNA, 1640 bp, Nipah virus
ttatacttgacaagagatgttattgtaatcttttaatattgattttgatgatctcggagtgtagtgttgggattctacattatgagaaattgagtaaaattggacttgtcaaaggagtaacaagaaaatacaagattaaaagcaatcctctcacaaaagacattgttataaaaatgattccgaatgtgtcgaacatgtctcagtgcacagggagtgtcatggaaaattataaaacacgattaaacggtatcttaacacctataaagggagcgttagagatctacaaaaacaacactcatgaccttgtcggtgatgtgagattagccggagttataatggcaggagttgctattgggattgcaaccgcagctcaaatcactgcaggtgtagcactatatgaggcaatgaagaatgctgacaacatcaacaaactcaaaagcagcattgaatcaactaatgaagctgtcgttaaacttcaagagactgcagaaaagacagtctatgtgctgactgctctacaggattacattaatactaatttagtaccgacaattgacaagataagctgcaaacagacagaactctcactagatctggcattatcaaagtacctctctgatttgctttttgtatttggccccaaccttcaagacccagtttctaattcaatgactatacaggctatatctcaggcattcggtggaaattatgaaacactgctaagaacattgggttacgctacagaagactttgatgatcttctagaaagtgacagcataacaggtcaaatcatctatgttgatctaagtagctactatataattgtcagggtttattttcctattctgactgaaattcaacaggcctatatccaagagttgttaccagtgagcttcaacaatgataattcagaatggatcagtattgtcccaaatttcatattggtaaggaatacattaatatcaaatatagagattggattttgcctaattacaaagaggagcgtgatctgcaaccaagattatgccacacctatgaccaacaacatgagagaatgtttaacgggatcgactgagaagtgtcctcgagagctggttgtttcatcacatgttcccagatttgcactatctaacggggttctgtttgccaattgcataagtgttacatgtcagtgtcaaacaacaggcagggcaatctcacaatcaggagaacaaactctgctgatgattgacaacaccacctgtcctacagccgtactcggtaatgtgattatcagcttagggaaatatctggggtcagtaaattataattctgaaggcattgctatcggtcctccagtctttacagataaagttgatatatcaagtcagatatccagcatgaatcagtccttacaacagtctaaggactatatcaaagaggctcaacgactccttgatactgttaatccatcattaataagcatgttgtctatgatcatactgtatgtattatcgatcgcatcgttgtgtatagggttgattacatttatcagttttatcattgttgagaaaaagagaaacacctacagcagattagaggataggagagtcagacctacaagcagtggggatctctactacattgggacatagtgtatt

SEQ ID NO: 222 - DNA, 1725 bp, respiratory syncytial virus
atggagctgctgatccacaggttaagtgcaatcttcctaactcttgctattaatgcattgtacctcacctcaagtcagaacataactgaggagttttaccaatcgacatgtagtgcagttagcagaggttattttagtgctttaagaacaggttggtataccagtgtcataacaatagaattaagtaatataaaagaaaccaaatgcaatggaactgacactaaagtaaaacttataaaacaagaattagataagtataagaatgcagtgacagaattacagctacttatgcaaaacacaccagctgccaacaaccgggccagaagagaagcaccacagtatatgaactatacaatcaataccactaaaaacctaaatgtatcaataagcaagaagaggaaacgaagatttctgggcttcttgttaggtgtaggatctgcaatagcaagtggtatagctgtatccaaagttctacaccttgaaggagaagtgaacaagatcaaaaatgctttgttatctacaaacaaagctgtagtcagtctatcaaatggggtcagtgttttaaccagcaaagtgttagatctcaagaattacataaataaccaattattacccatagtaaatcaacagagctgtcgcatctccaacattgaaacagttatagaattccagcagaagaacagcagattgttggaaatcaacagagaattcagtgtcaatgcaggtgtaacaacacctttaagcacttacatgttaacaaacagtgagttactatcattgatcaatgatatgcctataacaaatgatcagaaaaaattaatgtcaagcaatgttcagatagtaaggcaacaaagttattctatcatgtctataataaaggaagaagtccttgcatatgttgtacagctacctatctatggtgtaatagatacaccttgctggaaattacacacatcacctctatgcaccaccaacatcaaagaaggatcaaatatttgtttaacaaggactgatagaggatggtattgtgataatgcaggatcagtatccttctttccacaggctgacacttgtaaagtacagtccaatcgagtattttgtgacactatgaacagtttgacattaccaagtgaagtcagcctttgtaacactgacatattcaattccaagtatgactgcaaaattatgacatcaaaaacagacataagcagctcagtaattacttctcttggagctatagtgtcatgctatggtaaaactaaatgcactgcatccaacaaaaatcgtgggattataaagacattttctaatggttgtgactatgtgtcaaacaaaggagtagatactgtgtcagtgggcaacactttatactatgtaaacaagctggaaggcaagaacctttatgtaaaaggggaacctataataaattactatgaccctctagtgtttccttctgatgagtttgatgcatcaatatctcaagtcaatgaaaaaatcaatcaaagtttagcttttattcgtagatctgatgaattactacataatgtaaatactggcaaatctactacaaatattatgataactacaattattatagtaatcattgtagtattgttatcattaatagctattggtttgctgttgtattgcaaagccaaaaacacaccagttacactaagcaaagaccaactaagtggaatcaataatattgcattcagcaaatag

SEQ ID NO: 223 - DNA, 3770 bp, SARS virus
catgtttattttcttattatttcttactctcactagtggtagtgaccttgaccggtgcaccacttttgatgatgttcaagctcctaattacactcaacatacttcatctatgaggggggtttactatcctgatgaaatttttagatcagacactctttatttaactcaggatttatttcttccattttattctaatgttacagggtttcatactattaatcatacgtttggcaaccctgtcataccttttaaggatggtatttattttgctgccacagagaaatcaaatgttgtccgtggttgggtttttggttctaccatgaacaacaagtcacagtcggtgattattattaacaattctactaatgttgttatacgagcatgtaactttgaattgtgtgacaaccctttctttgctgtttctaaacccatgggtacacagacacatactatgatattcgataatgcatttaattgcactttcgagtacatatctgatgccttttcgcttgatgtttcagaaaagtcaggtaattttaaacacttacgagagtttgtgtttaaaaataaagatgggtttctctatgtttataagggctatcaacctatagatgtagttcgtgatctaccttctggttttaacactttgaaacctatttttaagttgcctcttggtattaacattacaaattttagagccattcttacagccttttcacctgctcaagacatttggggcacgtcagctgcagcctattttgttggctatttaaagccaactacatttatgctcaagtatgatgaaaatggtacaatcacagatgctgttgattgttctcaaaatccacttgctgaactcaaatgctctgttaagagctttgagattgacaaaggaatttaccagacctctaatttcagggttgttccctcaggagatgttgtgagattccctaatattacaaacttgtgtccttttggagaggtttttaatgctactaaattcccttctgtctatgcatgggagagaaaaaaaatttctaattgtgttgctgattactctgtgctctacaactcaacatttttttcaacctttaagtgctatggcgtttctgccactaagttgaatgatctttgcttctccaatgtctatgcagattcttttgtagtcaagggagatgatgtaagacaaatagcgccaggacaaactggtgttattgctgattataattataaattgccagatgatttcatgggttgtgtccttgcttggaatactaggaacattgatgctacttcaactggtaattataattataaatataggtatcttagacatggcaagcttaggccctttgagagagacatatctaatgtgcctttctcccctgatggcaaaccttgcaccccacctgctcttaattgttattggccattaaatgattatggtttttacaccactactggcattggctaccaaccttacagagttgtagtactttcttttgaacttttaaatgcaccggccacggtttgtggaccaaaattatccactgaccttattaagaaccagtgtgtcaattttaattttaatggactcactggtactggtgtgttaactccttcttcaaagagatttcaaccatttcaacaatttggccgtgatgtttctgatttcactgattccgttcgagatcctaaaacatctgaaatattagacatttcaccttgctcttttgggggtgtaagtgtaattacacctggaacaaatgcttcatctgaagttgctgttctatatcaagatgttaactgcactgatgtttctacagcaattcatgcagatcaactcacaccagcttggcgcatatattctactggaaacaatgtattccagactcaagcaggctgtcttataggagctgagcatgtcgacacttcttatgagtgcgacattcctattggagctggcatttgtgctagttaccatacagtttctttattacgtagtactagccaaaaatctattgtggcttatactatgtctttaggtgctgatagttcaattgcttactctaataacaccattgctatacctactaacttttcaattagcattactacagaagtaatgcctgtttctatggctaaaacctccgtagattgtaatatgtacatctgcggagattctactgaatgtgctaatttgcttctccaatatggtagcttttgcacacaactaaatcgtgcactctcaggtattgctgctgaacaggatcgcaacacacgtgaagtgttcgctcaagtcaaacaaatgtacaaaaccccaactttgaaatattttggtggttttaatttttcacaaatattacctgaccctctaaagccaactaagaggtcttttattgaggacttgctctttaataaggtgacactcgctgatgctggcttcatgaagcaatatggcgaatgcctaggtgatattaatgctagagatctcatttgtgcgcagaagttcaatggacttacagtgttgccacctctgctcactgatgatatgattgctgcctacactgctgctctagttagtggtactgccactgctggatggacatttggtgctggcgctgctcttcaaataccttttgctatgcaaatggcatataggttcaatggcattggagttacccaaaatgttctctatgagaaccaaaaacaaatcgccaaccaatttaacaaggcgattagtcaaattcaagaatcacttacaacaacatcaactgcattgggcaagctgcaagacgttgttaaccagaatgctcaagcattaaacacacttgttaaacaacttagctctaattttggtgcaatttcaagtgtgctaaatgatatcctttcgcgacttgataaagtcgaggcggaggtacaaattgacaggttaattacaggcagacttcaaagccttcaaacctatgtaacacaacaactaatcagggctgctgaaatcagggcttctgctaatcttgctgctactaaaatgtctgagtgtgttcttggacaatcaaaaagagttgacttttgtggaaagggctaccaccttatgtccttcccacaagcagccccgcatggtgttgtcttcctacatgtcacgtatgtgccatcccaggagaggaacttcaccacagcgccagcaatttgtcatgaaggcaaagcatacttccctcgtgaaggtgtttttgtgtttaatggcacttcttggtttattacacagaggaacttcttttctccacaaataattactacagacaatacatttgtctcaggaaattgtgatgtcgttattggcatcattaacaacacagtttatgatcctctgcaacctgagctcgactcattcaaagaagagctggacaagtacttcaaaaatcatacatcaccagatgttgatcttggcgacatttcaggcattaacgcttctgtcgtcaacattcaaaaagaaattgaccgcctcaatgaggtcgctaaaaatttaaatgaatcactcattgaccttcaagaattgggaaaatatgagcaatatattaaatggccttggtatgtttggctcggcttcattgctggactaattgccatcgtcatggttacaatcttgctttgttgcatgactagttgttgcagttgcctcaagggtgcatgctcttgtggttcttgctgcaagtttgatgaggatgactctgagccagttctcaagggtgtcaaattacattacacataaa

SEQ ID NO: 224 - DNA, 2784 bp, Varicella zoster
tattattcaaagtggagaaacagggatcgaccagaataccgtcgtaatctacgattcagacgttttttctcttctatacaccctaatgcagcggctggctccggattcaacggacccggcgttttcataacctccgttacgggggtgtggttatgctttttatgcatattttctatgtttgttacggcggttgtgtcggtctctccaagctcgttttatgagagtttacaagtagagcccacacaatcagaagatataacccggtctgctcatctgggcgatggtgatgaaatcagagaagctatacacaagtcccaggacgccgaaacaaaacccacgttttacgtctgcccaccgccaacaggctccacaatcgtacgattagaaccaactcggacatgtccggattatcaccttggtaaaaactttacagagggtattgctgttgtttataaagaaaacattgcagcgtacaagtttaaggcgacggtatattacaaagatgttatcgttagcacggcgtgggccggaagttcttatacgcaaattactaatagatatgcggatagggtaccaattcccgtttcagagatcacggacaccattgataagtttggcaagtgttcttctaaagcaacgtacgtacgaaataaccacaaagttgaagcctttaatgaggataaaaatccacaggatatgcctctaatcgcatcaaaatataattctgtgggatccaaagcatggcatactaccaatgacacgtacatggttgccggaacccccggaacatataggacgggcacgtcggtgaattgcatcattgaggaagttgaagccagatcaatattcccttatgatagttttggactttccacgggagatataatatacatgtccccgttttttggcctacgggatggtgcatacagagaacattccaattatgcaatggatcgttttcaccagtttgagggttatagacaaagggatcttgacactagagcattactggaacctgcagcgcggaactttttagtcacgcctcatttaacggttggttggaactggaagccaaaacgaacggaagtttgttcgcttgtcaagtggcgtgaggttgaagacgtagttcgcgatgagtatgcacacaattttcgctttacaatgaaaacactttctaccacgtttataagtgaaacaaacgagtttaatcttaaccaaatccatctcagtcaatgtgtaaaggaggaagcccgggctattattaaccggatctatacaaccagatacaactcatctcatgttagaaccggggatatccagacctaccttgccagaggggggtttgttgtggtgtttcaacccctgctgagcaattccctcgcccgtctctatctccaagaattggtccgtgaaaacactaatcattcaccacaaaaacacccgactcgaaataccagatcccgacgaagcgtgccagttgagttgcgtgccaatagaacaataacaaccacctcatcggtggaatttgctatgctccagtttacatatgaccacattcaagagcatgttaatgaaatgttggcacgtatctcctcgtcgtggtgccagctacaaaatcgcgaacgcgccctttggagcggactatttccaattaacccaagtgctttagcgagcaccattttggatcaacgtgttaaagctcgtattctcggcgacgttatctccgtttctaattgtccagaactgggatcagatacacgcattatacttcaaaactctatgagggtatctggtagtactacgcgttgttatagccgtcctttaatttcaatagttagtttaaatgggtccgggacggtggagggccagcttggaacagataacgagttaattatgtccagagatctgttagaaccatgcgtggctaatcacaagcgatattttctatttgggcatcactacgtatattatgaggattatcgttacgtccgtgaaatcgcagtccatgatgtgggaatgattagcacttacgtagatttaaacttaacacttcttaaagatagagagtttatgccgctgcaagtatatacaagagacgagctgcgggatacaggattactagactacagtgaaattcaacgccgaaatcaaatgcattcgctgcgtttttatgacatagacaaggttgtgcaatatgatagcggaacggccattatgcagggcatggctcagtttttccagggacttgggaccgcgggccaggccgttggacatgtggttcttggggccacgggagcgctgctttccaccgtacacggatttaccacgtttttatctaacccatttggggcattggccgtgggattattggttttggcgggactggtagcggccttttttgcgtaccggtacgtgcttaaacttaaaacaagcccgatgaaggcattatatccactcacaaccaaggggttaaaacagttaccggaaggaatggatccctttgccgagaaacccaacgctactgataccccaatagaagaaattggcgactcacaaaacactgaaccgtcggtaaatagcgggtttgatcccgataaatttcgagaagcccaggaaatgattaaatatatgacgttagtatctgcggctgagcgccaagaatctaaagcccgcaaaaaaaataagactagcgcccttttaacttcacgtcttaccggccttgctttacgaaatcgccgaggatactcccgtgttcgcaccgagaatgtaacgggggtgtaaata

SEQ ID NO: 225 - DNA, 2000 bp, Varicella zoster
gcggggatgttttatgaagccttaaaggccgagctggtatacacgagagcagtccatggttttagacctcgggcgaattgcgtggttttaagtgactatattccgagggtcgcctgtaatatggggacagttaataaacctgtggtgggggtattgatggggttcggaattatcacgggaacgttgcgtataacgaatccggtcagagcatccgtcttgcgatacgatgattttcacaccgatgaagacaaactggatacaaactccgtatatgagccttactaccattcagatcatgcggagtcttcatgggtaaatcggggagagtcttcgcgaaaagcgtacgatcataactcaccttatatatggccacgtaatgattatgatggatttttagagaacgcacacgaacaccatggggtgtataatcagggccgtggtatcgatagcggggaacggttaatgcaacccacacaaatgtctgcacaggaggatcttggggacgatacgggcatccacgttatccctacgttaaacggcgatgacagacataaaattgtaaatgtggaccaacgtcaatacggtgacgtgtttaaaggagatcttaatccaaaaccccaaggccaaagactcattgaggtgtcagtggaagaaaatcacccgtttactttacgcgcaccgattcagcggatttatggagtccggtacaccgagacttggagctttttgccgtcattaacctgtacgggagacgcagcgcccgccatccagcatatatgtttaaaacatacaacatgctttcaagacgtggtggtggatgtggattgcgcggaaaatactaaagaggatcagttggccgaaatcagttaccgttttcaaggtaagaaggaagcggaccaaccgtggattgttgtaaacacgagcacactgtttgatgaactcgaattagacccccccgagattgaaccgggtgtcttgaaagtacttcggacagaaaaacaatacttgggtgtgtacatttggaacatgcgcggctccgatggtacgtctacctacgccacgtttttggtcacctggaaaggggatgaaaaaacaagaaaccctacgcccgcagtaactcctcaaccaagaggggctgagtttcatatgtggaattaccactcgcatgtattttcagttggtgatacgtttagcttggcaatgcatcttcagtataagatacatgaagcgccatttgatttgctgttagagtggttgtatgtccccatcgatcctacatgtcaaccaatgcggttatattctacgtgtttgtatcatcccaacgcaccccaatgcctctctcatatgaattccggttgtacatttacctcgccacatttagcccagcgtgttgcaagcacagtgtatcaaaattgtgaacatgcagataactacaccgcatattgtctgggaatatctcatatggagcctagctttggtctaatcttacacgacgggggcaccacgttaaagtttgtagatacacccgagagtttgtcgggattatacgtttttgtggtgtattttaacgggcatgttgaagccgtagcatacactgttgtatccacagtagatcattttgtaaacgcaattgaagagcgtggatttccgccaacggccggtcagccaccggcgactactaaacccaaggaaattacccccgtaaaccccggaacgtcaccacttctacgatatgccgcatggaccggagggcttgcagcagtagtacttttatgtctcgtaatatttttaatctgtacggctaaacgaatgagggttaaagcctatagggtagacaagtccccgtataaccaaagcatgtattacgctggccttccagtggacgatttcgaggactcggaatctacggatacggaagaagagtttggtaacgcgattggagggagtcacgggggttcgagttacacggtgtatatagataagacccggtgatcaccgaa

SEQ ID NO: 226 - DNA, 1072 bp, Varicella zoster
atgtttttaatccaatgtttgatatcggccgttatattttacatacaagtgaccaacgctttgatcttcaagggcgaccacgtgagcttgcaagttaacagcagtctcacgtctatccttattcccatgcaaaatgataattatacagagataaaaggacagcttgtctttattggagagcaactacctaccgggacaaactatagcggaacactggaactgttatacgcggatacggtggcgttttgtttccggtcagtacaagtaataagatacgacggatgtccccggattagaacgagcgcttttatttcgtgtaggtacaaacattcgtggcattatggtaactcaacggatcggatatcaacagagccggatgctggtgtaatgttgaaaattaccaaaccgggaataaatgatgctggtgtgtatgtacttcttgttcggttagaccatagcagatccaccgatggtttcattcttggtgtaaatgtatatacagcgggctcgcatcacaacattcacggggttatctacacttctccgtctctacagaatggatattctacaagagccctttttcaacaagctcgtttgtgtgatttacccgcgacacccaaagggtccggtacctccctgtttcaacatatgcttgatcttcgtgccggtaaatcgttagaggataacccttggttacatgaggacgttgttacgacagaaactaagtccgttgttaaggaggggatagaaaatcacgtatatccaacggatatgtccacgttacccgaaaagtcccttaatgatcctccagaaaatctacttataattattcctatagtagcgtctgtcatgatcctcaccgccatggttattgttattgtaataagcgttaagcgacgtagaattaaaaaacatccaatttatcgcccaaatacaaaaacaagaaggggcatacaaaatgcgacaccagaatccgatgtgatgttggaggccgccattgcacaactagcaacgattcgcgaagaatcccccccacattccgttgtaaacccgtttgttaaatagaactaat

SEQ ID NO: 227 - protein, 9 aa, Influenza virus
YPYDVPDYA

SEQ ID NO: 228 - protein, 380 aa, Newcastle disease virus
MDSSRTIGLYFDSTLPSSNLLAFPIVLQDTGDGKKQITPQYRIQRLDSWTDSKEDSVFITTYGFIFQVGSEEVTVGTINDNPKHELLSSAMLCLGSVPNDGDLVELARACLTMVVTCKKSATNTERMVFSVVQAPRVLQSCMVVANRYSSVNAVKHVKVPEKIPGSGTLEYKVNFVSLTVVPKKDVYRIPTAALKVSGSSLYNLALNVTIDVEVDPKSPLVKSLSKSDSGYYANLFLHIGLMSTVDKKGKKVTFDKLEKKIRRLDLSVGLSDVLGPSVLVKARGVRTRLLAPFFSSSGTACYPIANASPQVAKILWSQTARLRSVKVIIQAGTQRAVAVTADHEVTSTKIEKRHTIAKYNPFKKSAASLRLQSARFPESP

SEQ ID NO: 229 - protein, 364 aa, Newcastle disease virus
MDSSRTIGLYFDSAHSSSNLLAFPIVLQDTGDGKKQIAPQYRIQRLDLWTDSKEDSVFITTYGFIFQVGNEEATVGIIDDKPKRELLSAAMLCLGSVPNTGDLIELARACLTMMVTCKKSATNTERMVFSVVQAPQVLQSCRVVANKYSSVNAVKHVKAPEKIPGSGTLEYKVNFVSLTVVPKKDVYKIPAAVLKISGSSLYNLALNVTINVEVDPRSPLVKSLSKSDSGYYANLFLHIGLMTTVDRKGKKVTFDKLEKKIRSLDLSVGLSDVLGPSVLVKARGARTKLLAPFFSSSGTACYPIANASPQVAKILWSQTACLRSVKIIIQAGTQRAVAVTADHEVTSTKLEKGHTLAKYNPFKK

SEQ ID NO: 230 - protein, 364 aa, Newcastle disease virus
MDSSRTIGLYFDSALPSSSLLAFPIVLQTTGDGKKQITPQYRIQRLDLWTDSKEDSVFITTYGFIFQVGDEEATVGTINDNPRQELLSSAMLCLGSVPNDGNLIELARACLTMVITCKKSATNTERMVFSIVQAPQVLQSCMVVANKYSSVNAVKHVKAPEKIPGSGTLEFKVNFVSLTVVPRKDVYRIPTAALKVSGSSLYNLALNVTIDVEVDPKSPLVKSLSKSDGGYYANLFLHIGLMSTVDKKGKKVTFDKLEEKIRRLNLSVGLSDVLGPSVLVKARGARTKLLAPFFSSSGTACYPIANASPQVAKILWSQTAHLRSVKAIIQAGTQRAVAVTSDHEVTSTKIEKGCAIAKYNPFKK

SEQ ID NO: 231 - protein, 364 aa, Newcastle disease virus
MDSSRTIGLYFDSALSSSNLLAFPIVLQDTGDGKKQIAPQYRIQRLDSWTDSKEDSVFITTYGFIFQVGNEEATVGMIDDKPKRELLSAAMLCLGSVPNTGDLVELARACLTMMVTCKKSATNTERMVFSVVQAPQVLQSCRVVANKYSSVNAVKHVKAPEKIPGSGTLEYKVNFVSLTVVPKKDVYKIPTAALKISGSSLYNLALNVTIDVEVDPKSPLVRSLSKSDSGYYANLFLHIGLMSTVDKKGKKVSFDKIEGKIRRLNLSVGLSDVLGPSVLVKARGARTKLLAPFFSSSGTACYPIANASPQVAKILWSQTAHLRSVKVIIQAGTQRAVAVTADHEVTSTKIEKRHTIAKYNPFKK

SEQ ID NO: 232 - protein, 364 aa, Newcastle disease virus
MDSSRTIGLYFDSALPSSSLLAFPIVLQDTGDGKKQITPQYRIQRLDSWTDSKEDSVFITTYGFIFQIGNEEVTVGMINDNPRHELLSSAMLCLGSVPNDGDLVELARACLTMVVTCKKSATNTERIVFSVVQAPRVLQSCMVVANRYSSVNAVKHVKAPEKIPGSGTLEYKVNFVSLTVVPRKDVYRIPTAALKISGSSLYNLALNVTIDVEVDPKSPLVKSLSKSDSGYYANLFLHIGLMSTVDKKGKKVTFDKIEGKIRRLNLSVGLSDVLGPSVLVKPRGARTKLLAPFFSSSGTACYPIANASPQVAKILWSQTAHLRSVKVIIQAGTQRAVAVTADHEVTSTKIEKKHTIAKYNPFKK

SEQ ID NO: 233 - protein, 364 aa, Newcastle disease virus
MDSSRTIGLYFDSALPSSSLLAFPIVLQTTGDGKKQITPQYRIQRLDSWTDSKEDSVFITTYGFIFQVGNEEVTVGTINDNPRQELLSSAMLCLGSVPNDGDLVELARACLTMVVTCKKSATNTERIVFSIVQAPRVLQSCMVVANRYSSVNAVKHVKAPEKIPGSGTLEYKVNFVSLTVVPRKDVYRIPTAALKVSGSSLYNLALNVTIDVEVDPKSPLVKSLSKSDSGYYANLFLHIGLMSTVDKKGKKVTFDKLERKIRRLNLSVGLSDVLGPSVLVKARGARTKLLAPFFSSSGTACYPIANASPQVAKILWSQTAHLRSVKVIIQAGTQRAVAVTADHEVTSTKIEKRHTIAKYNPFEK

SEQ ID NO: 234 - protein, 364 aa, Newcastle disease virus
MDSSRTIGLYFDSAHSSSNLLAFPIVLQGTGDGKKQIAPQYRIQRLDLWTDSKEDSVFITTYGFIFQVGNEEATVGMIDDKPKRELLSAAMLCLGSVPNTGDLIELARACLTMIVTCKKSATNTERMVFSVVQAPQVLQSCRVVANKYSSVNAVKHVKAPEKIPGSGTLEYKVNFVSLTVVPKKDVYKIPAAVLKVSGSSLYNLALNVTINVEVDPRSPLVKSLSKSDSGYYANLFLHIGLMTTVDRKGKKVTFDKLEKKIRSLDLSVGLSDVLGPSVLVKARGARTKLLAPFFSSSGTACYPIANASPQVAKILWSQTACLRSVKIIIQAGTQRAVAVTADHEVTSTKLEKGHTLAKYNPFKK

SEQ ID NO: 235 - protein, 364 aa, Newcastle disease virus
MDSSRTIGLYFDSALPSSSLLAFPIVLQDTGDGKKRITPQYRIQRLDSWTDSKEDSVFITTYGFIFQIGNEEVTVGMINDNPRHELLSSAMLCLGSVPNDGDLVELARACLTMAVTCKKSATNTERIVFSVVQAPRVLQSCMVVANRYSSVNAVKHVKAPEKIPGSGTLEYKVNFVSLTVVPRKDVYRIPTAALKISGSSLYNLALNVTIDVEVDPKSPLVKSLSKSDSGYYANLFLHIGLMSTVDRKGKKVTFDKIEGKIRRLNLSVGLSDVLGPSVLVKARGARTKLLAPFFSSSGTACYPIANASPQVAKILWSQTAHLRSVKVIIQAGTQRAVAVTADHEVTSTKIEKKHTIAKYNPFKK

SEQ ID NO: 236 - protein, 364 aa, Newcastle disease virus
MDSSRTIGLYFDSTLPSSNLLAFPIVLQDTRDGKKQITPQYRIQRLDSWTDSKEDSVFITTYGFIFQVGSEEVTVGMINDNPKHELLSSAMLCLGSVPNDGDLVELARACLTMVVTCKKSATNTERMVFSVVQAPRVLQSCTVVANRYSSVNAVKHVKVPEKIPGSGTLEYKVNFVSLTVVPRKDVYRIPTAALKVSGSSLYNLALNVTIDVEVDPKSPLVKSLSKSDSGYYANLFLHIGLMSTVDKKGKKVTFDKLERKIRRLDLSVGLSDVLGPSVLVKARGARTRLLAPFFSSSGTACYPIANASPQVAKILWSQTARLRSVKVIIQAGTQRAVAVTADHEVTSTKIEKRHTIAKYNPFKK

SEQ ID NO: 237 - protein, 364 aa, Newcastle disease virus
MDSSRTIGLYFDSALPSSSLLAFPIVLQDTGDGKKQITPQYRIQRLDSWTDSKEDSVFITTYGFIFQIGNEEATVGVINDNPKHELLSSAMLCLGSVPNDGDLVELARACLTMVVTCKKSATNTERIVFSVVQAPRVLQSCMVVANRYSSVNAVKHVKAPEKIPGSGTLEYKVNFVSLTVVPRRDVYRIPTAVLKVSGSSLYNLALNVTIDVDVDPKSPLVKSLSKSDSGYYANLFLHIGLMSTVDKKGKKVIFDKIEEKIRRLNLSVGLSDVLGPSVLVKARGARTKLLAPFFSSSGTACYPIANASPQVAKILWSQTAHLRSVKVIIQAGTQRAVAVTADHEVTSTKIERRHAIAKYNPFRK

SEQ ID NO: 238 - protein, 364 aa, Newcastle disease virus
MDSSRTIGLYFDSALPSSNLLAFPIVLQDTGDGKKQIAPQYRIQRLDSWTDSKEDSVFITTYGFIFQVGNEEATVGMINDNPKRELLSAAMLCLGSVPNVGDLVELARACLTMVVTCKKSATNNERMVFSVVQDPQVLQSCRVVANKYSPVNAVKYVKPPEKIPGIGTLEYQVNFVSLPVVPMQDVYKIPTAALKVSGSSLHNLALNVTIDVEVDPKSPLVKSLSKSDSGYYANLFLHIGLMSTVDKKGKKVTFDKLERKIRRLDLSVGLSDVLGPSVLVKARGARTKLLAPFFSSSGTACYPIANASPQVAKILWSQTACLRSVKVIIQAGTQRAVAVTADHEVTSTKLEKGHTIAKYNPFKK

SEQ ID NO: 239 - DNA, 1143 bp, Newcastle disease virus
atggactcatccaggacaatcgggctgtacttcgattccacccttccttccagcaacctgctagcattcccgatcgtcctacaagacacaggagatgggaagaagcaaatcaccccgcaatataggatccagcgtcttgactcgtggacagacagcaaagaagattcggtatttatcaccacttatggattcatcttccaggttgggagtgaggaagtcactgtcggcacgatcaatgataatcccaagcacgagttactttcctctgcgatgctctgcctaggaagtgtcccgaatgacggagatcttgttgagctggcgagggcctgccttactatggtggtaacatgcaagaagagtgcaactaatactgagagaatggtcttctcggtagtgcaagcaccccgggtactgcaaagctgtatggttgtggcgaacagatactcgtcagtgaatgcagttaagcacgtgaaagtaccagagaagatacctgggagcggaaccctagagtacaaggtgaactttgtctctttgacggtggtgccgaagaaggatgtctacaggatcccaaccgcagcattgaaagtgtctggctcgagcctgtacaatcttgcgctcaatgtcactattgatgtggaggtggacccgaagagcccgttagtcaaatccctttccaagtccgacagtggatactacgctaatctcttcttgcatatcggacttatgtccactgtagataagaaggggaagaaagtgacatttgacaagctggagaagaagataaggagactcgatctatccgtcgggctcagcgatgtgctcggaccttccgtgcttgtgaaggcgagaggtgtacggactaggctgctggcacctttcttctctagcagtgggacagcctgctatcctatagcaaatgcctctcctcaggtagccaagatactctggagtcaaactgcgcgcctgcggagtgtaaaagtcatcattcaagcgggcacccaacgcgctgtcgcagtgaccgctgaccatgaggttacctctactaagatagagaagaggcataccattgctaaatacaatcctttcaagaaatcggctgcatctctgagactgcaatccgcccgcttccccgaatcgccatga

SEQ ID NO: 240 - DNA, 1095 bp, Newcastle disease virus
atggactcatctaggacaattgggctgtactttgattctgcccattcttctagcaacctgttagcatttccgatcgtcctacaagacacaggagatgggaagaagcaaatcgccccgcaatataggatccagcgccttgacttgtggactgatagtaaggaagactcagtattcatcaccacctatggattcatctttcaagttgggaatgaagaagccactgtcggcattatcgatgataaacccaagcgcgagttactttccgctgcgatgctctgcctaggaagcgtcccaaataccggagaccttattgagctggcaagggcctgtctcactatgatggtcacatgcaagaagagtgcaactaatactgagagaatggttttctcagtagtgcaggcaccccaagtgctgcaaagctgtagggttgtggcaaacaaatactcatcagtgaatgcagtcaagcacgtgaaagcgccagagaagatccccgggagtggaaccctagaatacaaggtgaactttgtctccttgactgtggtaccgaagaaggatgtctacaagatcccagctgcagtattgaagatttctggctcgagtctgtacaatcttgcgctcaatgtcactattaatgtggaggtagacccgaggagtcctttggttaaatctctgtctaagtctgacagcggatactatgctaacctcttcttgcatattggacttatgaccaccgtagataggaaggggaagaaagtgacatttgacaagctggaaaagaaaataaggagccttgatctatctgtcgggctcagtgatgtgctcgggccttccgtgttggtaaaagcaagaggtgcacggactaagcttttggcacctttcttctctagcagtgggacagcctgctatcccatagcaaatgcttctcctcaggtggccaagatactctggagtcaaaccgcgtgcctgcggagcgttaaaatcattatccaagcaggtacccaacgcgctgtcgcagtgaccgctgaccacgaggttacctctactaagctggagaaggggcacacccttgccaaatacaatccttttaagaaataa

SEQ ID NO: 241 - DNA, 1095 bp, Newcastle disease virus
atggactcatccaggacaatcggactgtactttgattctgcccttccttccagcagcttgcttgctttcccgatcgtcttacagactacaggagatgggaagaagcaaatcaccccacaatataggatccagcgtcttgacttgtggacggacagcaaagaagattcggtattcatcaccacctacggattcattttccaagtcggggacgaagaagccactgtcggcacgatcaatgataaccccaggcaagagttactttcttctgcaatgctctgcctagggagtgttcctaatgacggaaatctcattgagctggcaagggcctgcctcactatggtgataacgtgcaagaagagtgcaaccaatactgagagaatggtcttctcaatagtgcaggcaccccaggtgctgcaaagctgtatggttgtggcaaataagtactcatcagtaaatgcagtaaaacatgtaaaagcaccagagaagatccccgggagcggaactctagagtttaaggtgaactttgtctctttgactgtagtgccaaggaaggatgtctacaggatccctaccgcagcattgaaagtatctggctcgagcctgtataatcttgcgctcaatgtcactattgatgtggaagtggacccaaagagcccattagtcaaatccctttccaagtccgatggcggatattatgccaatctcttcttacatatcgggcttatgtccactgtagataaaaagggaaagaaagtgacatttgacaagctggaagagaagataagaagactcaatctatctgttgggctcagtgatgtgctcggaccttccgtgctcgtgaaggcgagaggtgcacggaccaagctgctggcaccttttttctctagcagtgggacagcttgttaccctatagcaaatgcttctccccaggttgccaagatactttggagtcaaactgcgcacctgcgaagtgtaaaggccatcattcaagcgggcacccaacgtgctgtcgcagtgacctctgaccatgaggttacctctaccaagatagagaaggggtgcgccattgctaaatacaaccctttcaagaaatag

SEQ ID NO: 242 - DNA, 1095 bp, Newcastle disease virus
atggactcatctaggacaattgggctgtactttgattctgccctttcttctagcaacctgttagcatttccgatcgtcctacaagacacaggagatgggaagaagcaaatcgccccgcaatataggatccagcgccttgactcgtggactgatagtaaggaagactcagtattcatcaccacctatggattcatctttcaagttgggaatgaggaagccactgtcggcatgatcgatgataaacccaagcgcgagttactttccgctgcgatgctctgcctaggaagcgtcccaaataccggagaccttgttgagctggcaagggcctgtctcactatgatggtcacatgcaagaagagtgcaactaatactgagagaatggttttctcagtagtgcaggcaccccaagtgctgcaaagctgtagggttgtggcaaacaaatactcatcagtgaatgcagtcaagcacgtgaaagcgccagagaagatccccgggagtggaaccctagaatacaaggtgaactttgtctccttgactgtggtaccgaagaaggatgtctacaagatcccaactgcagcattgaaaatctctggctcgagcctgtacaacctcgcactcaatgtcactattgacgtggaggtagacccgaagagcccgttggtcagatccctttctaagtctgatagtggatactatgctaatctttttttgcatatcgggcttatgtccactgtagataagaagggaaagaaagtgtcatttgacaagatagagggaaagataaggagactcaatctttctgtcgggctcagtgatgtgctcggaccttctgtgcttgtgaaggcgagaggtgcacggactaagctactggcaccttttttctctagcagcgggacagcctgctatcctatagcaaatgcctctcctcaggttgctaagatactctggagtcaaactgcgcacctgcgaagtgtaaaagtcatcattcaagctggcacccaacgtgccgtcgcagtgactgctgatcatgaggttacctctactaagatagaaaagaggcacaccattgctaagtacaacccttttaaaaagtaa

SEQ ID NO: 243 - DNA, 1095 bp, Newcastle disease virus
atggactcatccaggacaatcgggctgtactttgattctgccctcccttccagcagcctgttagcattcccgatcgtcctacaagacacaggagatgggaagaagcaaatcaccccacaatacaggatccagcgtcttgactcgtggacagacagtaaggaagactcggtatttatcaccacctacggattcatcttccaaattgggaatgaagaagtcaccgtcggcatgatcaacgacaatcccaggcacgagttactttcttctgcgatgctctgcctaggaagtgtcccgaacgatggagatcttgttgaactggcgagggcctgcctcactatggtggtaacttgcaagaagagtgcgactaatactgaaagaatagtcttctcagtagtgcaggcacctcgggtgctgcaaagctgtatggttgtggcaaataggtactcatcagtgaatgcagtgaagcatgtgaaagcacccgagaagatccctgggagcggaaccctagagtataaggtgaattttgtctctttgactgtggtgccgaggaaagacgtctataggatcccaactgcagcattgaaaatatctggctcaagcctatacaatctcgcgctcaatgtcactattgatgtggaggtagacccgaagagcccgttagtcaaatccctttctaagtctgatagtggatactatgctaatctttttttgcatatcgggcttatgtccactgtagataagaagggaaagaaagtgacatttgacaagatagagggaaagataagaagactcaatctatctgtcgggctcagtgatgtgctcggaccttctgtgcttgtgaagccgagaggtgcacggactaagctactggcacctttcttctctagcagtgggacagcctgctatcctatagcaaatgcctctccccaggttgctaaaatactctggagccaaactgcgcacctgcggagtgtaaaagtcatcattcaagctggcacccaacgtgctgtcgcagtgactgctgatcatgaggttacctctaccaagatagagaagaaacacaccattgctaaatacaatcctttcaaaaagtaa

SEQ ID NO: 244 - DNA, 1241 bp, Newcastle disease virus
acgggtagaatcaaagtgccctgactgtgctaaaatggactcatccaggacaatcggactgtactttgattctgcccttccttccagcagcctgcttgctttcccgatcgtcctacaaaccacaggagatgggaagaagcaaatcaccccacaatataggatccagcgtcttgactcgtggacggacagcaaagaagattcggtatttatcaccacctacgggttcatcttccaagtcgggaatgaagaagtcactgtcggcacgatcaatgataaccctaggcaagagttactttcttctgcaatgctctgcctagggagtgtccctaatgacggagatctcgttgagctggcgagggcctgcctcactatggtggtaacgtgcaagaagagtgcaaccaatactgagagaatagtcttctcgatagtgcaggcaccccgggtgctgcaaagctgtatggttgtggcaaataggtactcatcagtgaatgcagtaaagcatgtaaaagcaccagagaagatccccgggagcggaactctagagtataaggtgaactttgtctctttgactgtggtgccgaggaaggatgtctacaggatcccaaccgcagcattgaaagtatctggctcgagcctgtacaatcttgcgctcaatgtcactattgatgtggaggtggacccgaagagcccattagtcaaatccctttccaagtccgatagtggatactatgctaatcttttcttacatatcgggcttatgtccactgtagataaaaagggaaagaaagtgacatttgacaagctggaaaggaagataagaagactcaatctatctgttgggctcagtgatgtgctcggaccttctgtgcttgtgaaggcgagaggtgcacggactaagctgttggcacctttcttctctagcagtgggacagcctgctaccctatagcaaatgcttctccccaggttgctaagatactctggagtcaaactgcgcacctgcgaagtgtaaaggtcatcattcaagcgggcacccaacgtgctgtcgcagtgaccgctgaccatgaggttacctctactaagatagagaagaggcatactattgctaaatacaaccccttcgagaaataggttgtattcctgatactattgtctgcccgctttcctgaatcattgcgacactagataatgatctgctttgattgcttatagttagtttacctgtctatccaattagaaaaaa

SEQ ID NO: 245 - DNA, 1095 bp, Newcastle disease virus
atggactcatctaggacaattgggctgtactttgattctgcccattcttctagcaacctgttagcatttccgatcgtcctacaaggcacaggagatgggaagaagcaaatcgccccgcaatataggatccagcgccttgacttgtggactgatagtaaggaggactcagtattcatcaccacctatggattcatctttcaagttgggaatgaagaagccactgtcggcatgatcgatgataaacccaagcgcgagttactttccgctgcgatgctctgcctaggaagcgtcccaaataccggagaccttattgagctggcaagggcctgtctcactatgatagtcacatgcaagaagagtgcaactaatactgagagaatggttttctcagtagtgcaggcaccccaagtgctgcaaagctgtagggttgtggcaaacaaatactcatcagtgaatgcagtcaagcacgtgaaagcgccagagaagattcccgggagtggaaccctagaatataaggtgaactttgtctccttgactgtggtaccgaagaaggatgtctacaagatcccagctgcagtattgaaggtttctggctcgagtctgtacaatcttgcgctcaatgtcactattaatgtggaggttgacccgaggagtcctttggttaaatctctgtctaagtctgacagcggatactatgctaacctcttcttgcatattggacttatgaccaccgtagataggaaggggaagaaagtgacatttgacaagctggaaaagaaaataaggagccttgatctatctgtcgggctcagtgatgtgctcgggccttccgtgttggtaaaagcaagaggtgcacggactaagcttttggcacctttcttctctagcagtgggacagcctgctatcccatagcaaatgcttctcctcaggtggccaagatactctggagtcaaaccgcgtgcctgcggagcgttaaaatcattatccaagcaggtacccaacgcgctgtcgcagtgaccgccgaccacgaggttacctctactaagctggagaaggggcacacccttgccaaatacaatccttttaagaaataa

SEQ ID NO: 246 - DNA, 1241 bp, Newcastle disease virus
acgggtagaatcaaaataccccgattgtgccaaaatggactcatccagaacaatcgggttgtactttgattctgccctcccttccagcagcctgttagcattcccgatcgtcttacaagacacaggagatgggaagaaacgaatcaccccacaatacaggatccagcgtcttgactcgtggacagacagtaaggaagactcagtatttatcaccacctacggattcatcttccaaattgggaatgaagaggtcactgttggcatgatcaacgacaatcccagacacgagttactttcctctgcaatgctctgcctaggaagtgtcccgaatgacggagatcttgttgaactggcaagggcctgcctcactatggcggtaacatgcaagaagagtgcaactaatactgagagaatagtcttctcagtagtgcaggcacctcgggtgctgcaaagctgtatggttgtggcaaataggtactcatcagtgaatgcagtgaagcatgtgaaagcacccgagaagatccctgggagcggaaccctagagtataaagtgaattttgtctctttgactgtggtgccgaggaaggatgtctacaggatcccaactgcagcattgaaaatctctggctcaagcctatacaacctcgcgctcaatgtcactattgacgtggaggtagacccgaagagcccgctagtcaaatccctttctaagtctgatagtggatactatgctaatctttttttgcatatcgggcttatgtctactgtagataggaagggaaagaaagtgacatttgacaagatagaaggaaagataagaagactcaatctatctgtcgggctcagtgatgtgctcggaccttctgtgcttgtgaaggcgagaggtgcacgaactaagctactggcaccttttttctctagcagcgggacagcctgctatcctatagcaaatgcctctcctcaggttgctaagatactctggagtcaaactgcgcacctgcggagtgtaaaggtcatcattcaagctggcacccaacgtgctgtcgcagtgactgctgatcatgaggttacctctactaagatagagaagaagcacaccattgctaagtacaatcctttcaagaagtaggttgcatctctgagactgcgagccacccactttcctaaatcatcgcgacactagataatgatctatcttgattgcttataattagttcacctgtctatctaattagaaaaaa

SEQ ID NO: 247 - DNA, 1095 bp, Newcastle disease virus
atggactcatccaggacaatcgggctgtacttcgattccacccttccttccagcaacctgttagcattcccgatcgtcctacaagacacaagagatgggaagaagcaaatcaccccgcaatataggatccagcgtcttgactcgtggacagacagtaaagaagattcggtatttatcaccacctatggattcatcttccaggttgggagtgaggaagtcactgtcggcatgatcaatgataatcccaagcacgagttactttcctctgcgatgctctgcctaggaagtgtcccgaatgatggagatcttgttgagctggcgagggcctgccttactatggtggtaacatgcaagaagagtgcgactaatactgagagaatggtcttctcggtagtgcaagcaccccgggtactgcaaagctgtacggttgtggcgaacagatactcgtcagtgaatgcagttaagcacgtgaaagtaccagagaagatccctgggagcggaaccctagagtacaaggtgaactttgtctctctgactgtggtgccgaggaaggatgtctacaggatcccaaccgcggcattgaaagtgtctggctcgagcctgtacaatcttgcgctcaatgtcactattgatgtggaggtggacccgaagagcccgttagtcaaatccctttccaagtccgacagtggatactacgctaatctcttcttgcatatcggacttatgtccactgtagataagaaggggaagaaagtgacatttgacaagctggagaggaagataaggagactcgatctatccgtcgggctcagtgatgtgctcggaccttccgtgcttgtgaaggcgagaggtgcacggactaggctgctggcaccttttttctctagcagtgggacagcctgctatcctatagcaaatgcctctcctcaggtagctaagatactctggagtcaaactgcgcgcctgcggagtgtaaaagtcatcatccaagcgggcacccaacgcgctgtcgcagtgactgctgaccatgaggttacctctactaagatagagaagaggcataccattgctaaatacaatcctttcaagaaatag

SEQ ID NO: 248 - DNA, 1095 bp, Newcastle disease virus
atggactcatccaggacaatcgggctgtactttgattctgccctcccttccagcagcctgttagcatttccgattgtcttacaagacacaggagacgggaagaagcaaatcaccccacaatacaggatccagcgccttgattcgtggacagacagtaaggaagactcggtattcatcaccacctacgggttcatctttcaaattgggaatgaagaagccactgtcggtgtgatcaatgacaatcccaagcacgagctactctcttccgcaatgctctgcttagggagtgtcccgaacgacggagatcttgttgagctggcaagagcctgcctcaccatggtggtaacttgcaagaagagtgcaactaacactgagagaatagtcttctcagtagtgcaggcacctcgggtgctgcaaagctgtatggttgtggcaaataggtactcatcagtgaatgcagtgaagcatgtgaaggcgccagaaaagatccctgggagcggaaccctagagtataaagtgaattttgtctctttgaccgtggtgccaagaagggatgtctacaggatcccaactgcagtattgaaagtgtctggctcaagcctgtacaatcttgcgctcaatgtcactattgatgtggacgtggatccgaagagcccgttagtcaaatccctttctaagtccgatagcggatactatgcgaatctttttctgcatatcgggcttatgtccactgtagataagaagggaaagaaagtgatatttgacaagatagaggaaaagataaggagactcaatctatccgtcgggctcagtgatgtgctcggaccctctgtgcttgtgaaggcgagaggtgcacggactaagttacttgctcctttcttctctagcagtgggacagcctgctatcctatagcaaatgcctctccccaggttgccaagatactctggagccaaactgcgcacttgcggagtgtgaaagtcatcattcaagccggcactcagcgtgctgtcgcagtgaccgctgatcatgaggtaacctccactaagatagagaggaggcatgccattgctaaatacaatcctttcaggaaataa

SEQ ID NO: 249 - DNA, 1095 bp, Newcastle disease virus
atggactcatctaggacaatcgggctgtactttgattctgcccttccttctagcaacctgttagcattcccgatcgtcctacaagacacaggggacgggaagaagcaaatcgccccgcaatataggatccagcgtcttgactcgtggacagacagcaaagaggactcggtgttcatcactacctatggattcatctttcaggttgggaatgaagaagccactgtcggcatgatcaatgataatcccaagcgcgagttactttccgctgcaatgctctgcctaggaagtgtcccaaatgtcggagatcttgtcgagctggcaagggcctgcctcactatggtagtaacatgcaagaagagtgcaactaacaacgagagaatggtcttctcagtagtgcaggacccccaggtgctgcaaagctgcagggttgtggcaaacaaatactcgccggtgaatgcagtcaagtacgtgaaaccgccagagaagatccctgggatcggaaccctagagtaccaggtgaactttgtctccttgcccgtggtaccgatgcaggatgtctacaagataccaactgcagcactaaaggtctctggctcgagtctgcacaatcttgcgctcaatgtcactattgatgtggaggtagacccgaagagcccgttggtcaaatctctttccaagtccgacagtggatactatgctaatctcttcttacatattgggcttatgtccactgtagataagaaggggaagaaagtgacatttgacaagctggagaggaagataaggagacttgatctatctgtcgggctcagtgacgtgctcggaccttccgtacttgtgaaggcgagaggtgcaaggactaagctgctggcacctttcttctctagcagtgggacagcctgctatcccatagcaaatgcctctcctcaggtggctaagatactctggagtcaaactgcgtgcctgcggagtgtcaaagtcattatccaagcaggtacccagcgcgctgtcgcagtgaccgctgaccatgaggttacctctactaagctggagaaggggcataccattgccaaatacaatcctttcaagaaatag

SEQ ID NO: 250 - protein, 467 aa, Homo sapiens
MTELPAPLSYFQNAQMSEDNHLSNTVRSQNDNRERQEHNDRRSLGHPEPLSNGRPQGNSRQVVEQDEEEDEELTLKYGAKHVIMLFVPVTLCMVVVVATIKSVSFYTRKDGQLIYTPFTEDTETVGQRALHSILNAAIMISVIVVMTILLVVLYKYRCYKVIHAWLIISSLLLLFFFSFIYLGEVFKTYNVAVDYITVALLIWNFGVVGMISIHWKGPLRLQQAYLIMISALMALVFIKYLPEWTAWLILAVISVYDLVAVLCPKGPLRMLVETAQERNETLFPALIYSSTMVWLVNMAEGDPEAQRRVSKNSKYNAESTERESQDTVAENDDGGFSEEWEAQRDSHLGPHRSTPESRAAVQELSSSILAGEDPEERGVKLGLGDFIFYSVLVGKASATASGDWNTTIACFVAILIGLCLTLLLLAIFKKALPALPISITFGLVFYFATDYLVQPFMDQLAFHQFYI

SEQ ID NO: 251 - protein, 529 aa, Influenza virus
MKTIIALSYILCLVFAQKLPGNDNSTATLCLGHHAVPNGTIVKTITNDQIEVTNATELVQSSSTGGICDSPHQILDGENCTLIDALLGDPQCDGFQNKKWDLFVERSKAYSNCYPYDVPDYASLRSLVASSGTLEFNNESFNWTGVTQNGTSSACKRRSNKSFFSRLNWLTHLKYKYPALNVTMPNNEKFDKLYIWGVLHPGTDSDQISLYAQASGRITVSTKRSQQTVIPNIGSRPRVRDVSSRISIYWTIVKPGDILLINSTGNLIAPRGYFKIRSGKSSIMRSDAPIGKCNSECITPNGSIPNDKPFQNVNRITYGACPRYIKQNTLKLATGMRNVPEKQTRGIFGAIAGFIENGWEGMVDGWYGFRHQNSEGTGQAADLKSTQAAINQINGKLNRLIGKTNEKFHQIEKEFSEVEGRIQDLEKYVEDTKIDLWSYNAELLVALENQHTIDLTDSEMNKLFERTKKQLRENAEDMGNGCFKIYHKCDNACIGSIRNGTYDHDVYRDEALNNRFQIKGVELKSGYKD

SEQ ID NO: 252 - protein, 751 aa, CMV gB protein
MESRIWCLVVCVNLCIVCLGAAVSSSSTRGTSATHSHHSSHTTSAAHSRSGSVSQRVTSSQTVSHGVNETIYNTTLKYGDVVGVNTTKYPYRVCSMAQGTDLIRFERNIVCTSMKPINEDLDEGIMVVYKRNIVAHTFKVRVYQKVLTFRRSYAYIHTTYLLGSNTEYVAPPMWEIHHINSHSQCYSSYSRVIAGTVFVAYHRDSYENKTMQLMPDDYSNTHSTRYVTVKDQWHSRGSTWLYRETCNLNCMVTITTARSKYPYHFFATSTGDVVDISPFYNGTNRNASYFGENADKFFIFPNYTIVSDFGRPNSALETHRLVAFLERADSVISWDIQDEKNVTCQLTFWEASERTIRSEAEDSYHFSSAKMTATFLSKKQEVNMSDSALDCVRDEAINKLQQIFNTSYNQTYEKYGNVSVFETTGGLVVFWQGIKQKSLVELERLANRSSLNLTHNRTKRSTDGNNATHLSNMESVHNLVYAQLQFTYDTLRGYINRALAQIAEAWCVDQRRTLEVFKELSKINPSAILSAIYNKPIAARFMGDVLGLASCVTINQTSVKVLRDMNVKESPGRCYSRPVVIFNFANSSYVQYGQLGEDNEILLGNHRTEECQLPSLKIFIAGNSAYEYVDYLFKRMIDLSSISTVDSMIALDIDPLENTDFRVLELYSQKELRSSNVFDLEEIMREFNSYKQRVKYVEDKVVDPLPPYLKGLDDLMSGLGAAGKAVGVAIGAVGGAVASVVEGVATFLKNP

SEQ ID NO: 253 - protein, 717 aa, CMV gB protein
MRPGLPSYLIILAVCLFSHLLSSRYGAEAVSEPLDKAFHLLLNTYGRPIRFLRENTTQCTYNSSLRNSTVVRENAISFNFFQSYNQYYVFHMPRCLFAGPLAEQFLNQVDLTETLERYQQRLNTYALVSKDLASYRSFSQQLKAQDSLGEQPTTVPPPIDLSIPHVWMPPQTTPHGWTESHTTSGLHRPHFNQTCILFDGHDLLFSTVTPCLHQGFYLIDELRYVKITLTEDFFVVTVSIDDDTPMLLIFGHLPRVLFKAPYQRDNFILRQTEKHELLVLVKKDQLNRHSYLKDPDFLDAALDFNYLDLSALLRNSFHRYAVDVLKSGRCQMLDRRTVEMAFAYALALFAAARQEEAGAQVSVPRALDRQAALLQIQEFMITCLSQTPPRTTLLLYPTAVDLAKRALWTPNQITDITSLVRLVYILSKQNQQHLIPQWALRQIADFALKLHKTHLASFLSAFARQELYLMGSLVHSMLVHTTERREIFIVETGLCSLAELSHFTQLLAHPHHEYLSDLYTPCSSSGRRDHSLERLTRLFPDATVPATVPAALSILSTMQPSTLETFPDLFCLPLGESFSALTVSEHVSYIVTNQYLIKGISYPVSTTVVGQSLIITQTDSQTKCELTRNMHTTHSITVALNISLENCAFCQSALLEYDDTQGVINIMYMHDSDDVLFALDPYNEVVVSSPRTHYLMLLKNGTVLEVTDVVVDATDSR

SEQ ID NO: 254 - protein, 653 aa, Ebola virus
MGVTGILQLPRDRFKRTSFFLWVIILFQRTFSIPLGVIHNSTLQVSDVDKLVCRDKLSSTNQLRSVGLNLEGNGVATDVPSATKRWGFRSGVPPKVVNYEAGEWAENCYNLEIKKPDGSECLPAAPDGIRGFPRCRYVHKVSGTGPCAGDFAFHKEGAFFLYDRLASTVIYRGTTFAEGVVAFLILPQAKKDFFSSHPLREPVNATEDPSSGYYSTTIRYQATGFGTNETEYLFEVDNLTYVQLESRFTPQFLLQLNETIYTSGKRSNTTGKLIWKVNPEIDTTIGEWAFWETKKNLTRKIRSEELSFTVVSNGAKNISGQSPARTSSDPGTNTTTEDHKIMASENSSAMVQVHSQGREAAVSHLTTLATISTSPQSLTTKPGPDNSTHNTPVYKLDISEATQVEQHHRRTDNDSTASDTPSATTAAGPPKAENTNTSKSTDFLDPATTTSPQNHSETAGNNNTHHQDTGEESASSGKLGLITNTIAGVAGLITGGRRTRREAIVNAQPKCNPNLHYWTTQDEGAAIGLAWIPYFGPAAEGIYIEGLMHNQDGLICGLRQLANETTQALQLFLRATTELRTFSILNRKAIDFLLQRWGGTCHILGPDCCIEPHDWTKNITDKIDQIIHDFVDKTLPDQGDNDNWWTGWRQWIP

SEQ ID NO: 255 - protein, 528 aa, Influenza virus
  misc_feature (144)..(144): Xaa can be any naturally occurring amino acid
  misc_feature (202)..(202): Xaa can be any naturally occurring amino acid
MKVKLLVLLCTFTATYADTICIGYHANNSTDTVDTVLEKNVTVTHSVNLLEDSHNGKLCLLKGIAPLQLGNCSVAGWILGNPECELLISKESWSYIVETPNPENGTCYPGYFADYEELREQLSSVSSFERFEIFPKESSWPNHXVTGVSASCSHNGKSSFYRNLLWLTGKNGLYPNLSKSYANNKEKEVLVLWGVHHPPNIXDQRALYHTENAYVSVVSSHYSRRFTPEIAKRPKVRDQEGRINYYWTLLEPGDTIIFEANGNLIAPRFAFALSRGFGSGIITSNAPMDECDAKCQTPQGAINSSLPFQNVHPVTIGECPKYVRSTKLRMVTGLRNIPSIQSRGLFGAIAGFIEGGWTGMVDGWYGYHHQNEQGSGYAADQKSTQNAINGITNKVNSVIEKMNTQFTAVGKEFNKLERRMENLNKKVDDGFLDIWTYNAELLVLLENERTLDFHDSNVKNLYEKVKSQLKNNAKEIGNGCFEFYHKCNDECMESVKNGTYDYPKYSEESKLNREKIDGVKLESMGVYQ

SEQ ID NO: 256 - protein, 548 aa, Influenza B virus
MKAIIVLLMVVTSNADRICTGITSSNSPHVVKTATQGEVNVTGVIPLTTTPTKSHFANLKGTETRGKLCPKCLNCTDLDVALGRPKCTGNIPSARVSILHEVRPVTSGCFPIMHDRTKIRQLPNLLRGYEHIRLSTHNVINAENAPGGSYKIGTSGSCPNVTNGNGFFATMAWAVPKNDNNKTATNSLTIEVPYICTEGEDQITVWGFHSDNEAQMAKLYGDSKPQKFTSSANGVTTHYVSQIGGFPNQTEDGGLPQSGRIVVDYMVQKSGKTGTITYQRGILLPQKVWCASGRSKVIKGSLPLIGEADCLHEKYGGLNKSKPYYTGEHAKAIGNCPIWVKTPLKLANGTKYRPPAKLLKERGFFGAIAGFLEGGWEGMIAGWHGYTSHGAHGVAVAADLKSTQEAINKITKNLNSLSELEVKNLQRLSGAMDELHNEILELDEKVDDLRADTISSQIELAVLLSNEGIINSEDEHLLALERKLKKMLGPSAVEIGNGCFETKHKCNQTCLDRIAAGTFDAGEFSLPTFDSLNITAASLNDDGLDNHT

SEQ ID NO: 257 - protein, 529 aa, Influenza virus
MKTIIALSYILCLVFAQKLPGNDNSTATLCLGHHAVPNGTIVKTITNDQIEVTNATELVQSSSTGGICDSPHQILDGENCTLIDALLGDPQCDGFQNKKWDLFVERSKAYSNCYPYDVPDYASLRSLVASSGTLEFNNESFNWTGVTQNGTSSACKRGSNKSFFSRLNWLTHLKFKYPALNVTMPNNEKFDKLYIWGVHHPGTDNDQISLYAQASGRITVSTKRSQQTVIPNIGSRPRVRDIPSRISIYWTIVKPGDILLINSTGNLIAPRGYFKIRSGKSSIMRSDAPIGKCNSECITPNGSIPNDKPFQNVNRITYGACPRYVKQNTLKLATGMRNVPEKQTRGIFGAIAGFIENGWEGMVDGWYGFRHQNSEGTGQAADLKSTQAAINQINGKLNRLIGKTNEKFHQIEKEFSEVEGRIQDLEKYVEDTKIDLWSYNAELLVALENQHTIDLTDSEMNKLFERTKKQLRENAEDMGNGCFKIYHKCDNACIGSIRNGTYDHDVYRDEALNNRFQIKGVELKSGYKD

SEQ ID NO: 258 - protein, 679 aa, Human immunodeficiency virus
MRVKEIRRNYQHLWRWGTMLLGILMICSAAEKLWVTVYYGVPVWKEANTTLFCASDAKATKAEVHNVWATHACVPTDPNPQELALENVTEKFDMWKNNMVEQMHEDIISLWDQSLKPCVKLTPLCVTLTCTDYSGNNNTNITGKANTTIDDIEMKNCSFNITTGIRDKVKREYALFYKVDVVPIEKNTSYRLIHCNTSTITQACPKVSFEPIPIHYCAPAGFAILKCKDKKFNGTGLCTNVSTVQCTHGIRPVVSTQLLLNGSLAEEEVVIRSQNFTDNVKTIIVQLNESVVINCTRPNNNTRKSIHIGPGGAFYTTGQVIGNIRQAYCNISEEQWNKTLKYIVEKLREQFGNKTIIFNQSSGGDPEIVTHSFNCGGEFFYCNTSRLFNSTWNITEGSNSTAGSNKNITLPCRIKQIINMWQEVGKAMYAPPISGLIRCTSNITGLLLTRDGGHDNKTNDTEIFRPGGGNMRDNWRSELYKYKVVKIEPLGIAPTKARRRVVQRDKRAVGIGAMFLGILGAAGSTMGAASITLTVQARQLLSGIVQQQNNLLRAIEAQQHLLQLTVWGIKQLQARVLAVERYLKDQQLLGIWGCSGKLICTTNVPWNTSWSNRSLDYIWGNMTWIQWEREIDNYTDLIYTLIEESQDQQEKNELELMKLDKWDSLWSWFSITNWLWYIR

SEQ ID NO: 259 - protein, 797 aa, HSV gH protein
MGNGLWFVGVIILGAAWGQVHDWTEQTDPWFLDGLGMDRMYWRDTNTGRLWLPNTPDPQKPPRGFLAPPDELNLTTASLPLLRWYEERFCFVLVTTAEFPRDPGQLLYIPKTYLLGRPPNASLPAPTTVEPTAQPPPAVAPLKGLLHNPTASVLLRSRAWVTFSAVPDPEALTFPRGDNVATASHPSGPRDTPPPRPPVGARRHPTTELDITHLHNASTTWLATRGLLRSPGRYVYFSPSASTWPVGIWTTGELVLGCDAALVRARYGREFMGLVISMHDSPPAEVMVVPAGQTLDRVGDPADENPPGALPGPPGGPRYRVFVLGSLTRADNGSALDALRRVGGYPEEGTNYAQFLSRAYAEFFSGDAGAEQGPRPPLFWRLTGLLATSGFAFVNAAHANGAVCLSDLLGFLAHSRALAGLAARGAAGCAADSVFFNVSVLDPTARLQLEARLQHLVAEILEREQSLALHALGYQLAFVLDSPSAYDAVAPSAAHLIDALYAEFLGGRVVTTPVVHRALFYASAVLRQPFLAGVPSAVQRERARRSLLIASALCTSDVAAATNADLRTALARADHQKTLFWLPDHFSPCAASLRFDLDESVFILDALAQATRSETPVEVLAQQTHGLASTLTRWAHYNALIRAFVPEASHRCGGQSANVEPRILVPITHNASYVVTHSPLPRGIGYKLTGVDVRRPLFLTYLTATCEGSTRDIESKRLVRTQNQRDLGLVGAVFMRYTPAGEVMSVLLVDTDNTQQQIAAGPTEGAPSVFSSDVPSTALLLFPNGTVIHLLAFDTQP

SEQ ID NO: 260 - protein, 531 aa, Influenza virus
MEKIVLLLAIVSLVKSDQICIGYHANNSTEQVDTIMEKNVTVTHAQDILEKTHNGKLCDLNGVKPLILRDCSVAGWLLGNPMCDEFINVPEWSYIVEKASPANDLCYPGDFNDYEELKHLLSRTNHFEKIQIIPKSSWSNHDASSGVSSACPYHGRSSFFRNVVWLIKKNSAYPTIKRSYNNTNQEDLLVLWGIHHPNDAAEQTKLYQNPTTYISVGTSTLNQRLVPEIATRPKVNGQSGRMEFFWTILKPNDAINFESNGNFIAPEYAYKIVKKGDSAIMKSELEYGNCNTKCQTPMGAINSSMPFHNIHPLTIGECPKYVKSNRLVLATGLRNTPQRERRRKKRGLFGAIAGFIEGGWQGMVDGWYGYHHSNEQGSGYAADKESTQKAIDGVTNKVNSIIDKMNTQFEAVGREFNNLERRIENLNKQMEDGFLDVWTYNAELLVLMENERTLDFHDSNVKNLYDKVRLQLRDNAKELGNGCFEFYHKCDNECMESVKNGTYDYPQYSEEARLNREEISGVKLESMGTYQ

SEQ ID NO: 261 - protein, 523 aa, Influenza virus
METISLITILLVVTASNADKICIGHQSTNSTETVDTLTETNVPVTHAKELLHTEHNGMLCATSLGHPLILDTCTIEGLVYGNPSCDLLLGGREWSYIVERSSAVNGTCYPGNVENLEELRTLFSSASSYQRIQIFPDTTWNVTYTGTSRACSGSFYRSMRWLTQKSGFYPVQDAQYTNNRGKSILFVWGIHHPPTYTEQTNLYIRNDTTTSVTTEDLNRTFKPVIGPRPLVNGLQGRIDYYWSVLKPGQTLRVRSNGNLIAPWYGHVLSGGSHGRILKTDLKGGNCVVQCQTEKGGLNSTLPFHNISKYAFGTCPKYVRVNSLKLAVGLRNVPARSSRGLFGAIAGFIEGGWPGLVAGWYGFQHSNDQGVGMAADRDSTQKAIDKITSKVNNIVDKMNKQYEIIDHEFSEVETRLNMINNKIDDQIQDVWAYNAELLVLLENQKTLDEHDANVNNLYNKVKRALGSNAMEDGKGCFELYHKCDDQCMETIRNGTYNRRKYREESRLERQKIEGVKLESEGTYK

SEQ ID NO: 262 - protein, 531 aa, Influenza virus; identical to SEQ ID NO: 260

SEQ ID NO: 263 - protein, 490 aa, Nipah virus
MVVILDKRCYCNLLILILMISECSVGILHYEKLSKIGLVKGVTRKYKIKSNPLTKDIVIKMIPNVSNMSQCTGSVMENYKTRLNGILTPIKGALEIYKNNTHDLVGDVRLAGVIMAGVAIGIATAAQITAGVALYEAMKNADNINKLKSSIESTNEAVVKLQETAEKTVYVLTALQDYINTNLVPTIDKISCKQTELSLDLALSKYLSDLLFVFGPNLQDPVSNSMTIQAISQAFGGNYETLLRTLGYATEDFDDLLESDSITGQIIYVDLSSYYIIVRVYFPILTEIQQAYIQELLPVSFNNDNSEWISIVPNFILVRNTLISNIEIGFCLITKRSVICNQDYATPMTNNMRECLTGSTEKCPRELVVSSHVPRFALSNGVLFANCISVTCQCQTTGRAISQSGEQTLLMIDNTTCPTAVLGNVIISLGKYLGSVNYNSEGIAIGPPVFTDKVDISSQISSMNQSLQQSKDYIKEAQRLLDTVNPSLIS

SEQ ID NO: 264 - protein, 524 aa, respiratory syncytial virus
MELLIHRLSAIFLTLAINALYLTSSQNITEEFYQSTCSAVSRGYFSALRTGWYTSVITIELSNIKETKCNGTDTKVKLIKQELDKYKNAVTELQLLMQNTPAANNRARREAPQYMNYTINTTKNLNVSISKKRKRRFLGFLLGVGSAIASGIAVSKVLHLEGEVNKIKNALLSTNKAVVSLSNGVSVLTSKVLDLKNYINNQLLPIVNQQSCRISNIETVIEFQQKNSRLLEINREFSVNAGVTTPLSTYMLTNSELLSLINDMPITNDQKKLMSSNVQIVRQQSYSIMSIIKEEVLAYVVQLPIYGVIDTPCWKLHTSPLCTTNIKEGSNICLTRTDRGWYCDNAGSVSFFPQADTCKVQSNRVFCDTMNSLTLPSEVSLCNTDIFNSKYDCKIMTSKTDISSSVITSLGAIVSCYGKTKCTASNKNRGIIKTFSNGCDYVSNKGVDTVSVGNTLYYVNKLEGKNLYVKGEPIINYYDPLVFPSDEFDASISQVNEKINQSLAFIRRSDELLHNVNTGKSTTN

SEQ ID NO: 265 - protein, 524 aa, respiratory syncytial virus; identical to SEQ ID NO: 264

SEQ ID NO: 266 - protein, 1193 aa, SARS virus
MFIFLLFLTLTSGSDLDRCTTFDDVQAPNYTQHTSSMRGVYYPDEIFRSDTLYLTQDLFLPFYSNVTGFHTINHTFGNPVIPFKDGIYFAATEKSNVVRGWVFGSTMNNKSQSVIIINNSTNVVIRACNFELCDNPFFAVSKPMGTQTHTMIFDNAFNCTFEYISDAFSLDVSEKSGNFKHLREFVFKNKDGFLYVYKGYQPIDVVRDLPSGFNTLKPIFKLPLGINITNFRAILTAFSPAQDIWGTSAAAYFVGYLKPTTFMLKYDENGTITDAVDCSQNPLAELKCSVKSFEIDKGIYQTSNFRVVPSGDVVRFPNITNLCPFGEVFNATKFPSVYAWERKKISNCVADYSVLYNSTFFSTFKCYGVSATKLNDLCFSNVYADSFVVKGDDVRQIAPGQTGVIADYNYKLPDDFMGCVLAWNTRNIDATSTGNYNYKYRYLRHGKLRPFERDISNVPFSPDGKPCTPPALNCYWPLNDYGFYTTTGIGYQPYRVVVLSFELLNAPATVCGPKLSTDLIKNQCVNFNFNGLTGTGVLTPSSKRFQPFQQFGRDVSDFTDSVRDPKTSEILDISPCSFGGVSVITPGTNASSEVAVLYQDVNCTDVSTAIHADQLTPAWRIYSTGNNVFQTQAGCLIGAEHVDTSYECDIPIGAGICASYHTVSLLRSTSQKSIVAYTMSLGADSSIAYSNNTIAIPTNFSISITTEVMPVSMAKTSVDCNMYICGDSTECANLLLQYGSFCTQLNRALSGIAAEQDRNTREVFAQVKQMYKTPTLKYFGGFNFSQILPDPLKPTKRSFIEDLLFNKVTLADAGFMKQYGECLGDINARDLICAQKFNGLTVLPPLLTDDMIAAYTAALVSGTATAGWTFGAGAALQIPFAMQMAYRFNGIGVTQNVLYENQKQIANQFNKAISQIQESLTTTSTALGKLQDVVNQNAQALNTLVKQLSSNFGAISSVLNDILSRLDKVEAEVQIDRLITGRLQSLQTYVTQQLIRAAEIRASANLAATKMSECVLGQSKRVDFCGKGYHLMSFPQAAPHGVVFLHVTYVPSQERNFTTAPAICHEGKAYFPREGVFVFNGTSWFITQRNFFSPQIITTDNTFVSGNCDVVIGIINNTVYDPLQPELDSFKEELDKYFKNHTSPDVDLGDISGINASVVNIQKEIDRLNEVAKNLNESLIDLQELGKYEQYIK

SEQ ID NO: 267 - protein, 689 aa, Varicella zoster
MFVTAVVSVSPSSFYESLQVEPTQSEDITRSAHLGDGDEIREAIHKSQDAETKPTFYVCPPTGSTIVRLEPTRTCPDYHLGKNFTEGIAVVYKENIAAYKFKATVYYKDVIVSTAWAGSSYTQITNRYADRVPIPVSEITDTIDKFGKCSSKATYVRNNHKVEAFNEDKNPQDMPLIASKYNSVGSKAWHTTNDTYMVAGTPGTYRTGTSVNCIIEEVEARSIFPYDSFGLSTGDIIYMSPFFGLRDGAYREHSNYAMDRFHQFEGYRQRDLDTRALLEPAARNFLVTPHLTVGWNWKPKRTEVCSLVKWREVEDVVRDEYAHNFRFTMKTLSTTFISETNEFNLNQIHLSQCVKEEARAIINRIYTTRYNSSHVRTGDIQTYLARGGFVVVFQPLLSNSLARLYLQELVRENTNHSPQKHPTRNTRSRRSVPVELRANRTITTTSSVEFAMLQFTYDHIQEHVNEMLARISSSWCQLQNRERALWSGLFPINPSALASTILDQRVKARILGDVISVSNCPELGSDTRIILQNSMRVSGSTTRCYSRPLISIVSLNGSGTVEGQLGTDNELIMSRDLLEPCVANHKRYFLFGHHYVYYEDYRYVREIAVHDVGMISTYVDLNLTLLKDREFMPLQVYTRDELRDTGLLDYSEIQRRNQMHSLRFYDIDKVVQYDSGTAIMQGMAQFFQG

SEQ ID NO: 268 - protein, 575 aa, Varicella zoster
MFYEALKAELVYTRAVHGFRPRANCVVLSDYIPRVACNMGTVNKPVVGVLMGFGIITGTLRITNPVRASVLRYDDFHTDEDKLDTNSVYEPYYHSDHAESSWVNRGESSRKAYDHNSPYIWPRNDYDGFLENAHEHHGVYNQGRGIDSGERLMQPTQMSAQEDLGDDTGIHVIPTLNGDDRHKIVNVDQRQYGDVFKGDLNPKPQGQRLIEVSVEENHPFTLRAPIQRIYGVRYTETWSFLPSLTCTGDAAPAIQHICLKHTTCFQDVVVDVDCAENTKEDQLAEISYRFQGKKEADQPWIVVNTSTLFDELELDPPEIEPGVLKVLRTEKQYLGVYIWNMRGSDGTSTYATFLVTWKGDEKTRNPTPAVTPQPRGAEFHMWNYHSHVFSVGDTFSLAMHLQYKIHEAPFDLLLEWLYVPIDPTCQPMRLYSTCLYHPNAPQCLSHMNSGCTFTSPHLAQRVASTVYQNCEHADNYTAYCLGISHMEPSFGLILHDGGTTLKFVDTPESLSGLYVFVVYFNGHVEAVAYTVVSTVDHFVNAIEERGFPPTAGQPPATTKPKEITPVNPGTSPLLR

SEQ ID NO: 269 - protein, 272 aa, Varicella zoster
MFLIHCLISAVIFYIQVTNALIFKGDHVSLQVNSSLTSILIPMQNDNYTEIKGQLVFIGEQLPTGTNYSGTLELLYADTVAFCFRSVQVIRYDGCPRIRTSAFISCRYKHSWHYGNSTDRISTEPDAGVMLKITKPGINDAGVYVLLVRLDHSRSTDGFILGVNVYTAGSHHNIHGVIYTSPSLQNGYSTRALFQQARLCDLPATPKGSGTSLFQHMLDLRAGKSLEDNPWLHEDVVTTETKSVVKEGIENHVYPTDMSTLPEKSLNDPPEN

SEQ ID NO: 270 - protein, 437 aa, Influenza virus
VTLHFKQYEFNSPPNNQVMLCEPTIIERNITEIVYLTNTTIEKEICPKLAEYRNWSKPQCNITGFAPFSKDNSIRLSAGGDIWVTREPYVSCDPDKCYQFALGQGTTLNNVHSNDTVHDRTPYRTLLMNELGVPFHLGTKQVCIAWSSSSCHDGKAWLHVCVTGDDENATASFIYNGRLVDSIVSWSKKILRTQESECVCINGTCTVVMTDGSASGKADTKILFIEEGKIVHTSTLSGSAQHVEECSCYPRYPGVRCVCRDNWKGSNRPIVDINIKDYSIVSSYVCSGLVGDTPRKNDSSSSSHCLDPNNEEGGHGVKGWAFDDGNDVWMGRTISEKLRSGYETFKVIEGWSNPNSKLQINRQVIVDRGNRSGYSGIFSVEGKSCINRCFYVELIRGRKQETEVLWTSNSIVVFCGTSGTYGTGSWPDGADINLMPI

SEQ ID NO: 271 - protein, 210 aa, Metapneumovirus
ESNEALSLCRIQGTPAPRDNKTNTENATKETTLHTTTTTRDPEVRETKTTKPQANEGATNPSRNLTTKGDKHQTTRATTEAELEKQSKQTTEPGTSTQKHTPARPSSKSPTTTQATAQPTTPTAPKASTAPKNRQATTKKTETDTTTASRARNTNNPTETATTTPKATTETGKGKEGPTQHTTKEQPETTARETTTPQPRRTAGASPRAS

SEQ ID NO: 272 - protein, 433 aa, Influenza virus
SDILLKFPSAEITAPTMPLDCANASNVQAVNRSATKGVTLLLPEPEWTYPRLSCPGSTFQEALLISPHRFGETKGNSAPLIIREPFIACGPKECKHFALTHYAAQPGGHYNGTRGDRNKLRHLISVKLGKIPTVENSIFHMAAWSGSACHDGKEWTYIGVDGPDNNALLKIEYGEAYTDTYHSYANNILRTQESACNCIGGNCYLMITDGSASGVSECRFLKIREGRIIKEIFPTGRIKHTEECTCGFASNKTIECACRDNSYTAKRPFVKLNVETDTAEIRLMCTETYLDTPRPDDGSITGPCESNGDKGSGGIKGGFVHQRMASKIGRWYSRTMSKTKRMGMGLYVKYDGDPWADSDALAFSGVMVSMEEPGWYSFGFEIKDKKCDVPCIGIEMVHDGGKETWHSAATAIYCLMGSGQLLWDTVTGVDMAL

SEQ ID NO: 273 - protein, 168 aa, Human metapneumovirus
NYTIQKTSSESEHHTSSPPTESNKEASTISTDNPDINPNSQHPTQQSTENPTLNPAASVSPSETEPASTPDTTNRLSSVDRSTAQPSESRTKTKPTVHTRNNPSTASSTQSPPRATTKAIRRATTFRMSSTGKRPTTTSVQSDSSTTTQNHEETGSANPQASVSTMQN

SEQ ID NO: 274 - protein, 250 aa, respiratory syncytial virus
NHKVTLTTVTVQTIKNHTEKNITTYLTQVSPERVSPSKQPTTTPPIHTNSATISPNTKSETHHTTAQTKGRTTTPTQNNKPSTKPRPKNPPKKPKDDYHFEVFNFVPCSICGNNQLCKSICKTIPSNKPKKKPTIKPTNKPPTKTTNKRDSKTLAKTLKKETTINPTKKPTPKTTERDTSTLQSIVLDTTTSKHTERDTSTSQSIVLDTTTSKHTIQQQSLHSTTPENTPNSTQTPTASEPSTSNSNQKL

SEQ ID NO: 275 - protein, 415 aa, Influenza virus
SHSIQTGNQHQAEPISNTNFLTEKAVASVTLAGNSSLCPISGWAVHSKDNSIRIGSKGDVFVIREPFISCSHLECRTFFLTQGALLNDKHSNGTVKDRSPHRTLMSCPVGEAPSPYNSRFESVAWSASACHDGTSWLTIGISGPDNGAVAVLKYNGIITDTIKSWRNNILRTQESECACVNGSCFTVMTDGPSNGQASYKIFKMEKGKVVKSVELDAPNYHYEECSCYPDAGEITCVCRDNWHGSNRPWVSFNQNLEYQIGYICSGVFGDNPRPNDGTGSCGPVSPNGAYGVKGFSFKYGNGVWIGRTKSTNSRSGFEMIWDPNGWTGTDSSFSVKQDIVAITDWSGYSGSFVQHPELTGLDCIRPCFWVELIRGRPKESTIWTSGSSISFCGVNSDTVGWSWPDGAELPFTIDK

SEQ ID NO: 276 - protein, 438 aa, Influenza virus
NTVIHEKIGNHQTVIHPTITTPAVPNCSDTIITYNNTVINNITTTIITEAERLFKPPLPLCPFRGFFPFHKDNAIRLGENKDVIVTREPYVSCDNDNCWSFALAQGALLGTKHSNGTIKDRTPYRSLIRFPIGTAPVLGNYKEICIAWSSSSCFDGKEWMHVCMTGNDNDASAQIIYAGRMTDSIKSWRKDILRTQESECQCIGGTCVVAVTDGPAANSADHRVYWIREGRIVKYENVPKTKIQHLEECSCYVDIDVYCICRDNWKGSNRPWMRINNETILETGYVCSKFHSDTPRPADPSTVSCDSPSNINGGPGVKGFGFKAGNDVWLGRTVSTSGRSGFEIIKVTDGWINSPNHAKSVTQTLVSNNDWSGYSGSFIVKTKGCFQPCFYVELIRGRPNKNDDVSWTSNSIVTFCGLDNEPGSGNWPDGSNIGFMPK

SEQ ID NO: 277 - protein, 432 aa, Influenza virus
KQYECNSPPNNQVMLCEPTIIERNITEIVYLTNTTIEKEICPKLAEYRNWSKPQCNITGFAPFSKDNSIRLSAGGDIWVTREPYVSCDPDKCYQFALGQGTTLNNGHSNDTVHDRTPYRTLLMNELGVPFHLGTKQVCIAWSSSSCHDGKAWLHVCVTGDDENATASFIYNGRLVDSIGSWSKKILRTQESECVCINGTCTVVMTDGSASGKADTKILFIEEGKIVHTSLLSGSAQHVEECSCYPRYPGVRCVCRDNWKGSNRPIVDINVKDYSIVSSYVCSGLVGDTPRKNDSSSSSHCLDPNNEEGGHGVKGWAFDDGNDVWMGRTISEKLRSGYETFKVIEGWSKPNSKLQINRQVIVDRGNRSGYSGIFSVEGKSCINRCFYVELIRGRKQETEVLWTSNSIVVFCGTSGTYGTGSWPDGADINLMPI

SEQ ID NO: 278 - protein, 559 aa, Measles virus
RLHRAAIYTAENHKSLSTNLDVTNSIEHQVKDVLTPLFKIIGDEVGLRTPQRFTDLVKFISDKIKFLNPDREYDFRDLTWCINPPERIKLDYDQYCADVAAEELMNALVNSTLLEARATNQFLAVSKGNCSGPTTIRGQFSNMSLSLLDLYLSRGYNVSSIVTMTSQGMYGGTYLVEKPNLSSKGSELSQLSMHRVFEVGVIRNPGLGAPVFHMTNYFEQPVSNDFSNCMVALGELKFAALCHREDSITIPYQGSGKGVSFQLVKLGVWKSPTDMRSWVPLSTDDPVIDRLYLSSHRGVIADNQAKWAVPTTRTDDKLRMETCFQQACKGKNQALCENPEWAPLKDNRIPSYGVLSVNLSLTVELKIKIASGFGPLITHGSGMDLYKTNHNNVYWLTIPPMKNLALGVINTLEWIPRFKVSPNLFTVPIKEAGEDCHAPTYLPAEVDGDVKLSSNLVILPGQDLQYVLATYDTSRVEHAVVYYVYSPSRSFSYFYPFRLPIKGVPIELQVECFTWDKKLWCRHFCVLADSESGGHITHSGMVGMGVSCTVTREDGTNRR

SEQ ID NO: 279 - protein, 529 aa, Mumps virus
ELIRMINDQGLSNQLSSITDKIRESAAMIASAVGVMNQVIHGVTVSLPLQIEGNQNQLLSTLATICTNRNQVSNCSTNIPLVNDLRFINGINKFIIEDYATHDFSIGHPLNMPSFIPTATSPNGCTRIPSFSLGKTHWCYTHNVINANCKDHTSSNQYVSMGILVQTASGYPMFKTLKIQYLSDGLNRKSCSIATVPDGCAMYCYVSTQLETDDYAGSSPPTQKLTLLFYNDTIKERTISPSGLEGNWATLVPGVGSGIYFENKLIFPAYGGVLPNSTLGVKSAREFFRPVNPYNPCSGPPQELDQRALRSYFPSYFSSRRVQSAFLVCAWNQILVTNCELVVPSNNQTLMGAEGRVLLINNRLLYYQRSTSWWPYELLYEISFTFTNSGQSSVNMSWIPIYSFTRPGLGKCSGENICPTVCVSGVYLDPWPLTPYSHQSGINRNFYFTGALLNSSTTRVNPTLYVSALNNLKVLAPYGTQGLFASYTTTTCFQDTGDASVYCVYIMELASNIVGEFQILPVLARLTIT

SEQ ID NO: 280 - protein, 531 aa, Nipah virus
NYTRSTDNQAVIKDALQGIQQQIKGLADKIGTEIGPKVSLIDTSSTITIPANIGLLGSKISQSTASINENVNEKCKFTLPPLKIHECNISCPNPLPFREYRPQTEGVSNLVGLPNNICLQKTSNQILKPKLISYTLPVVGQSGTCITDPLLAMDEGYFAYSHLERIGSCSRGVSKQRIIGVGEVLDRGDEVPSLFMTNVWTPPNPNTVYHCSAVYNNEFYYVLCAVSTVGDPILNSTYWSGSLMMTRLAVKPKSNGGGYNQHQLALRSIEKGRYDKVMPYGPSGIKQGDTLYFPAVGFLVRTEFKYNDSNCPITKCQYSKPENCRLSMGIRPNSHYILRSGLLKYNLSDGENPKVVFIEISDQRLSIGSPSKIYDSLGQPVFYQASFSWDTMIKFGDVLTVNPLVVNWRNNTVISRPGQSQCPRFNTCPEICWEGVYNDAFLIDRINWISAGVFLDSNQTAENPVFTVFKDNEILYRAQLASEDTNAQKTITNCFLLKNKIWCISLVEIYDTGDNVIRPKLFAVKIPEQCT

SEQ ID NO: 281 - protein, 481 aa, Parainfluenza virus
KIDSIETVIFSALKDMHTGSMSNTNCTPGNLLLHDAAYINGINKFLVLKSYNGTPKYGPLLNIPSFIPSATSPNGCTRIPSFSLIKTHWCYTHNVMLGDCLDFTTSNQYLAMGIIQQSAAAFPIFRTMKTIYLSDGINRKSCSVTAIPGGCVLYCYVATRSEKEDYATTDLAELRLAFYYYNDTFIERVISLPNTTGQWATINPAVGSGIYHLGFILFPVYGGLISGTPSYNKQSSRYFIPKHPNITCAGNSSEQAAAARSSYVIRYHSNRLIQSAVLICPLSDMHTARCNLVMFNNSQVMMGAEGRLYVIDNNLYYYQRSSSWWSASLFYRINTDFSKGIPPIIEAQWVPSYQVPRPGVMPCNATSFCPANCITGVYADVWPLNDPEPTSQNALNPNYRFAGAFLRNESNRTNPTFYTASASALLNTTGFNNTNHKAAYTSSTCFKNTGTQKIYCLIIIEMGSSLLGEFQIIPFLRELIP

SEQ ID NO: 282 - protein, 519 aa, Parainfluenza virus
DLIIKQDTCMKTNIMTVSSMNESAKIIKETITELIRQEVISRTINIQSSVQSGIPILLNKQSRDLTQLIEKSCNRQELAQICENTIAIHHADGISPLDPHDFWRCPVGEPLLSNNPNISLLPGPSLLSGSTTISGCVRLPSLSIGDAIYAYSSNLITQGCADIGKSYQVLQLGYISLNSDMYPDLNPVISHTYDINDNRKSCSVIAAGTRGYQLCSLPTVNETTDYSSEGIEDLVFDILDLKGKTKSHRYKNEDITFDHPFSAMYPSVGSGIKIENTLIFLGYGGLTTPLQGDTKCVINRCTNVNQSVCNDALKITWLKKRQVVNVLIRINNYLSDRPKIVVETIPITQNYLGAEGRLLKLGKKIYIYTRSSGWHSNLQIGSLDINNPMTIKWAPHEVLSRPGNQDCNWYNRCPRECISGVYTDAYPLSPDAVNVATTTLYANTSRVNPTIMYSNTSEIINMLRLKNVQLEAAYTTTSCITHFGKGYCFHIVEINQASLNTLQPMLFKTSIPKICKITS

SEQ ID NO: 283 - protein, 327 aa, Vaccinia virus
DIENEITEFFNKMRDTLPAKDSKWLNPACMFGGTMNDIAALGEPFSAKCPPIEDSLLSHRYKDYVVKWERLEKNRRRQVSNKRVKHGDLWIANYTSKFSNRRYLCTVTTKNGDCVQGIVRSHIKKPPSCIPKTYELGTHDKYGIDLYCGILYAKHYNNITWYKDNKEINIDDIKYSQTGKKLIIHNPELEDSGRYNCYVHYDDVRIKNDIVVSRCKILTVIPSQDHRFKLILDPKINVTIGEPANITCTAVSTSLLIDDVLIEWENPSGWLIGFDFDVYSVLTSRGGITEATLYFENVTEEYIGNTYKCRGHNYYFEKTLTTTVVLE

SEQ ID NO: 284 - protein, 104 aa, prion
MANLGCWMLVLFVATWSDLGLCKKRPKPGGWNTGGSRYPGQGSPGGNRYPPQGGGGWGQPHGGGWGQPHGGGWGQPHGGGWGQPHGGGWGQGGGTHSQWNKPSK

SEQ ID NO: 285 - protein, 97 aa, prion
SRPIIHFGSDYEDRYYRENMHRYPNQVYYRPMDEYSNQNNFVHDCVNITIKQHTVTTTTKGENFTETDVKMMERVVEQMCITQYERESQAYYQRGSS

SEQ ID NO: 286 - protein, 15 aa, Glut-1
EEFYNQTWVHRYGES

SEQ ID NO: 287 - protein, 9 aa, Glut-1
FEKAGVQQP

SEQ ID NO: 288 - protein, 7 aa, Glut-1
EQLCGPY

SEQ ID NO: 289 - protein, 9 aa, LMP2A
SSYAAAQRK

SEQ ID NO: 290 - protein, 14 aa, LMP2A
RRRWRRLTVCGGIM

SEQ ID NO: 291 - protein, 28 aa, Homo sapiens
TFGLVFYFATDYLVQPFMDQLAFHQFYI

SEQ ID NO: 292 - protein, 180 aa, Hepatitis B virus
MGLSWTVPLEWGKNLSTSNPLGFLPDHQLDPAFRANTNNPDWDFNPKKDPWPEANKVGVGAYGPGFTPPHGGLLGWSPQSQGTLTTLPADPPPASTNRQSGRQPTPISPPLRDSHPQAMQWNSTAFHQALQNPKVRGLYFPAGGSSSGIVNPVPTIASHISSIFSRIGDPAPNMENITSG

SEQ ID NO: 293 - protein, 12 aa, Artificial Sequence
  Synthetic
VGVDPKSPLVKS

SEQ ID NO: 294 - protein, 12 aa, Artificial Sequence
  Synthetic
DSGYYANLFLHI

SEQ ID NO: 295 - protein, 12 aa, Artificial Sequence
  Synthetic
VGVDAKSALVKS

SEQ ID NO: 296 - protein, 12 aa, Artificial Sequence
  Synthetic
DSGYYANLFLHI

SEQ ID NO: 297 - protein, 12 aa, Artificial Sequence
  Synthetic
VGVDPKSPLVKS

SEQ ID NO: 298 - protein, 12 aa, Artificial Sequence
  Synthetic
DSGYAANAFLHI

SEQ ID NO: 299 - protein, 12 aa, Artificial Sequence
  Synthetic
VGVDPKSPLVKS

SEQ ID NO: 300 - protein, 12 aa, Artificial Sequence
  Synthetic
DSGYYPDLFLHI

SEQ ID NO: 301 - protein, 12 aa, Artificial Sequence
  Synthetic
VGVDPKSPLVKS

SEQ ID NO: 302 - protein, 12 aa, Artificial Sequence
  Synthetic
DSGYPTAPFLHI

SEQ ID NO: 303 - protein, 32 aa, Newcastle disease virus
TSTSALITYIALTAISLVCGILSLVLACYLMY

SEQ ID NO: 304 - protein, 32 aa, Newcastle disease virus
TSTSALITYIVLTVISLVCGILSLVLACYLMY

SEQ ID NO: 305 - protein, 32 aa, Newcastle disease virus; identical to SEQ ID NO: 304

SEQ ID NO: 306 - protein, 32 aa, Newcastle disease virus
TSTSALITYIVLTIISLVCGILSLILAFYLMY

SEQ ID NO: 307 - protein, 32 aa, Newcastle disease virus; identical to SEQ ID NO: 306

SEQ ID NO: 308 - protein, 32 aa, Newcastle disease virus
TSTSALITYIVLTIISLVCGILSLVLAFYLMY

SEQ ID NO: 309 - protein, 32 aa, Newcastle disease virus
TSTSALITYIFLTVISLVCGILSLVLACYLMY

SEQ ID NO: 310 - protein, 32 aa, Newcastle disease virus
TSTSALITYIVLTVISLVCGILSLVLACYLMH

SEQ ID NO: 311 - protein, 32 aa, Newcastle disease virus
TSTSALITYIVLTVISLVCGVLSLVLAFYLMY

SEQ ID NO: 312 - protein, 32 aa, Newcastle disease virus; identical to SEQ ID NO: 311

SEQ ID NO: 313 - protein, 32 aa, Newcastle disease virus
TSTSALITYIVLAVVSLAFGVISLVLACYLMY

SEQ ID NO: 314 - protein, 32 aa, Newcastle disease virus
TSTSALITYIVLAVISLAFGVISLVLACYLMY

SEQ ID NO: 315 - protein, 32 aa, Newcastle disease virus
TSTSALITYIVLTVISLVFGALSLGLACYLMY

SEQ ID NO: 316 - protein, 32 aa, Newcastle disease virus
TSTSALITYIVLTIISLVFGILSLVLACYLMY

SEQ ID NO: 317 - protein, 32 aa, Newcastle disease virus
INTSALITYIVLTVISLVFSALGLILGCYLMY

SEQ ID NO: 318 - protein, 26 aa, Newcastle disease virus
KQKAQQKTLLWLGNNTLGQMRATTKM

SEQ ID NO: 319 - protein, 26 aa, Newcastle disease virus
KQKAQQKTLLWLGNNTLGQMRATTKM

SEQ ID NO: 320 - protein, 26 aa, Newcastle disease virus
KQKAQQKTLLWLGNNTLGQMRATTKM

SEQ ID NO: 321 - protein, 26 aa, Newcastle disease virus
KQKAQQKTLLWLGNNTLGQMRATTKM

SEQ ID NO: 322 - protein, 26 aa, Newcastle disease virus
KQKAQQKTLLWLGNNTLGQMRATTKM

SEQ ID NO: 323 - protein, 26 aa, Newcastle disease virus
KQKAQQKTLLWLGNNTLGQMRATTKM

SEQ ID NO: 324 - protein, 26 aa, Newcastle disease virus
KQKAQQKTLLWLGNNTLGQMRATTKM

SEQ ID NO: 325 - protein, 26 aa, Newcastle disease virus
KQKAQQKTLLWLGNNTLGQMRATTKA

SEQ ID NO: 326 - protein, 26 aa, Newcastle disease virus
KQKAQQKTLLWLGNNTLGQMRATTKI

SEQ ID NO: 327 - protein, 26 aa, Newcastle disease virus
KQKAQQKTLLWLGNNTLGQMRATTKI

SEQ ID NO: 328 - protein, 26 aa, Newcastle disease virus
KQKAQQKTLLWLGNNTLDQMRATTRT

SEQ ID NO: 329 - protein, 26 aa, Newcastle disease virus
KQKAQQKTLLWLGNNTLDQMRATTRT

SEQ ID NO: 330 - protein, 26 aa, Newcastle disease virus
KQKAQQKTLLWLGNNTLDQMRATTRA

SEQ ID NO: 331 - protein, 24 aa, Newcastle disease virus
KQKAQQKTLLWLGNNTLDQMRATT

SEQ ID NO: 332 - protein, 24 aa, Newcastle disease virus
KQKAQQKTLLWLGNNTLDQMRATT

SEQ ID NO: 333 - protein, 26 aa, Newcastle disease virus
MNRAVCQVALENDEREAKNTWRLVFR

SEQ ID NO: 334 - protein, 26 aa, Newcastle disease virus
MNRAVCQVALENDEREAKNTWRLVFR

SEQ ID NO: 335 - protein, 26 aa, Newcastle disease virus
MDRAVSQVALENDEREAKNTWRLVFR

SEQ ID NO: 336 - protein, 26 aa, Newcastle disease virus
MDRAVSQVALENDEREAKNTWRLVFR

SEQ ID NO: 337 - protein, 26 aa, Newcastle disease virus
MDRAVSQVALENDEREAKNTWRLIFR

SEQ ID NO: 338 - protein, 26 aa, Newcastle disease virus
MDRAVSQVALENDEREAKNTWRLIFR

SEQ ID NO: 339 - protein, 26 aa, Newcastle disease virus
MDRAVSQVALENDEREAKNTWRLIFR

SEQ ID NO: 340 - protein, 26 aa, Newcastle disease virus
MDRAVSQVALENDEREAKNTWRLVFR

SEQ ID NO: 341 - protein, 26 aa, Newcastle disease virus
MDRTVNQVALENDEREAKNTWRLVFR

SEQ ID NO: 342 - protein, 26 aa, Newcastle disease virus
MDRAVSRVALENEEREAKNTWRFVFR

SEQ ID NO: 343 - protein, 26 aa, Newcastle disease virus
MDLPVGRVALENEEREAKNTWRFVFR

SEQ ID NO: 344 - protein, 26 aa, Newcastle disease virus
MDRAVNRVVLENEEREAKNTWRLVFR

SEQ ID NO: 345 - protein, 26 aa, Newcastle disease virus
MDRAVSRVVLENEEREAKNTWRFVFR

SEQ ID NO: 346 - protein, 25 aa, Newcastle disease virus
MDRAVNRVVLENEEREAKNTWRLVF

SEQ ID NO: 347 - protein, 26 aa, Newcastle disease virus
MDRAVNRVVLENEEREAKNTWRLVFR

SEQ ID NO: 348 - protein, 26 aa, Newcastle disease virus
MDRVVSRVVLENEEREAKNTWRLVFR

SEQ ID NO: 349 - protein, 26 aa, Newcastle disease virus
MDHTVNRVVLENEEREAKNTWRSVFR

SEQ ID NO: 350 - protein, 26 aa, Newcastle disease virus
MDRVVSRVVLENEEREAKNTWRLVFR

SEQ ID NO: 351 - protein, 26 aa, Newcastle disease virus
MDRVVSRVVLENEEREAKNTWRLVFR

SEQ ID NO: 352 - protein, 22 aa, Newcastle disease virus
IAILLLTVMTLAISAAALAYSM

SEQ ID NO: 353 - protein, 22 aa, Newcastle disease virus
IAILLLTVMTLAISAAALAYSM

SEQ ID NO: 354 - protein, 22 aa, Newcastle disease virus
IAILLSTVVTLAISAAALAYSM

SEQ ID NO: 355 - protein, 22 aa, Newcastle disease virus
IAILFLTVVTLAISAAALAYSM

SEQ ID NO: 356 - protein, 22 aa, Newcastle disease virus
IAILFLTVVTLAISVASLLYSM

SEQ ID NO: 357 - protein, 22 aa, Newcastle disease virus
IAILFLTVVTLAISVASLLYSM

SEQ ID NO: 358 - protein, 22 aa, Newcastle disease virus
IAILLLTVVTLATSVASLVYSM

SEQ ID NO: 359 - protein, 22 aa, Newcastle disease virus
IAILLLTVVTLAISAAALAYSM

SEQ ID NO: 360 - protein, 22 aa, Newcastle disease virus
IATLLLIVMTLAFSAAALAYSM

SEQ ID NO: 361 - protein, 22 aa, Newcastle disease virus
IAILLLIVITLAISAAALVYSM

SEQ ID NO: 362 - protein, 22 aa, Newcastle disease virus
IAIFLLIVITLAISAAALVYSM

SEQ ID NO: 363 - protein, 22 aa, Newcastle disease virus
IAVLLLMVMTLAISAAALVYSM

SEQ ID NO: 364 - protein, 22 aa, Newcastle disease virus
IAVLLLIVMTLAISAAALVYSM

SEQ ID NO: 365 - protein, 26 aa, Newcastle disease virus
IAVLLLMVMTLAISAAALAYSTGAST

SEQ ID NO: 366 - protein, 26 aa, Newcastle disease virus
IAVLLLMVMTLAISSAALAYSTGAST

SEQ ID NO: 367 - protein, 26 aa, Newcastle disease virus
IAVLLLIVMTLAISAAALVYSMGAIM

SEQ ID NO: 368 - protein, 26 aa, Newcastle disease virus
TTVLLLMVMTLAISIAALVYIMGAST

SEQ ID NO: 369 - protein, 22 aa, Newcastle disease virus
IAVLSLVVMTLAISVATLVYSM

SEQ ID NO: 370 - protein, 22 aa, Newcastle disease virus
IAVLSLIVMTLAISVAALVYSM

SEQ ID NO: 371 - protein, 11 aa, Newcastle disease virus
TSTSALITYIA

SEQ ID NO: 372 - protein, 9 aa, Influenza virus HA
GYKDVILWF

SEQ ID NO: 373 - protein, 10 aa, Artificial Sequence
  Synthetic
GYKDLITYIA

SEQ ID NO: 374 - protein, 13 aa, Artificial Sequence
  Synthetic
GYKDGGGLITYIA

SEQ ID NO: 375 - protein, 12 aa, Artificial Sequence
  Synthetic
GYKDSALITYIA

SEQ ID NO: 376 - protein, 11 aa, Newcastle disease virus
ALAYSMEASTP

SEQ ID NO: 377 - protein, 11 aa, Influenza NA
ILITTVTLHFK

SEQ ID NO: 378 - protein, 11 aa, Artificial Sequence
  Synthetic
ALAYSVTLHFK

SEQ ID NO: 379 - protein, 12 aa, Newcastle disease virus
CYLMYKQKAQQK

SEQ ID NO: 380 - protein, 13 aa, Influenza virus HA
LGFIMYACQKGNI

SEQ ID NO: 381 - protein, 13 aa, Artificial Sequence
  Synthetic
LGFIMYKQKAQQK

SEQ ID NO: 382 - protein, 11 aa, Newcastle disease virus
RLVFRIAILLL

SEQ ID NO: 383 - protein, 11 aa, Influenza virus NA
NPNQKIITIGS

SEQ ID NO: 384 - protein, 11 aa, Artificial Sequence
  Synthetic
RLVFRIITIGS

SEQ ID NO: 385 - protein, 281 aa, Artificial Sequence
  Synthetic
  MISC_FEATURE (1)..(47): NDV HN CT and TM domains
MNRAVCQVALENDEREAKNTWRLVFRIAILLLTVMTLAISAAALAYSANHKVTPTTAIIQDATSQIKNTTPTYLTQNPQLGISPSNPSEITSQITTILASTTPGVKSTLQSTTVKTKNTTTTQTQPSKPTTKQRQNKPPSKPNNDFHFEVFNFVPCSICSNNPTCWAICKRIPNKKPGKKTTTKPTKKPTLKTTKKDPKPQTTKSKEVPTTKPTEEPTINTTKTNIITTLLTSNTTGNPELTSQMETFHSTSSEGNPSPSQVSTTSEYPSQPSSPPNTPRQ

SEQ ID NO: 386 - protein, 21 aa, Artificial Sequence
  Synthetic
IAILLLTVMTLAISAAALAYS

SEQ ID NO: 387 - protein, 234 aa, Artificial Sequence
  Synthetic
ANHKVTPTTAIIQDATSQIKNTTPTYLTQNPQLGISPSNPSEITSQITTILASTTPGVKSTLQSTTVKTKNTTTTQTQPSKPTTKQRQNKPPSKPNNDFHFEVFNFVPCSICSNNPTCWAICKRIPNKKPGKKTTTKPTKKPTLKTTKKDPKPQTTKSKEVPTTKPTEEPTINTTKTNIITTLLTSNTTGNPELTSQMETFHSTSSEGNPSPSQVSTTSEYPSQPSSPPNTPRQ

SEQ ID NO: 388 - DNA, 141 bp, Artificial Sequence
  Synthetic
atgaaccgcgcagtttgccaagttgcgctagagaatgatgaaagggaagcgaagaatacatggcgcttggtattccggatcgcaatcttacttttaacagtaatgaccttagccatctctgcggccgccctggcatatagt

SEQ ID NO: 389 - DNA, 705 bp, Artificial Sequence
  Synthetic
gcgaatcataaggtcacacccacgaccgcaatcattcaggacgctactagccaaatcaaaaacacaacccctacgtatttgactcagaacccacaactgggtatttcaccgtcgaatcccagtgaaatcacctcccagatcacaactattcttgcctctaccacgcctggcgttaagagcacactccaatcaactaccgtaaagacgaaaaacacaactaccacccagacgcagccatccaagccgacaactaaacaaaggcagaacaagcccccttcgaagccaaataacgatttccacttcgaggtgtttaacttcgtcccgtgtagtatctgctctaataaccccacctgttgggctatttgcaaaagaatccctaacaagaagccaggaaaaaagacgacaactaaacccaccaagaagcctacgttgaaaacaactaagaaggacccgaaaccacaaaccacgaagagcaaagaagttcccacaactaagcctaccgaggaaccgacgatcaatacaactaagaccaacattatcacgacactgctcacttcaaataccactggtaacccagagctgacctcccagatggaaaccttccattcgacgagttctgagggcaaccccagcccttcccaagtatcaacaacttcggaatacccatctcagcccagtagccctccgaataccccacgacaataa

SEQ ID NO: 390 - protein, 275 aa, Artificial Sequence
  Synthetic
  MISC_FEATURE (1)..(47): NDV HN CT and TM domains
MNRAVCQVALENDEREAKNTWRLVFRIAILLLTVMTLAISAAALAYSANHKVTLTTVTVQTIKNHTEKNITTYLTQVSPERVSSSIQPTTTSPIHTNSATISPNTKSETHHTTTQAKSRITTSTQTNKPSTKSRSKNPPKKPKDDYHFEVFNFVPCSICGNNQLCKSICKTIPSNKPKKKPTIKPTNKPTVKTTNKRDPKTPAKMMKKETTTNPTKKPTLKTTEGDTSTSQSTVLDTTTSKHTIQQQSLHSITSENTPNSTQIPTATEASTSNST

SEQ ID NO: 391 - protein, 228 aa, Artificial Sequence
  Synthetic
ANHKVTLTTVTVQTIKNHTEKNITTYLTQVSPERVSSSIQPTTTSPIHTNSATISPNTKSETHHTTTQAKSRITTSTQTNKPSTKSRSKNPPKKPKDDYHFEVFNFVPCSICGNNQLCKSICKTIPSNKPKKKPTIKPTNKPTVKTTNKRDPKTPAKMMKKETTTNPTKKPTLKTTEGDTSTSQSTVLDTTTSKHTIQQQSLHSITSENTPNSTQIPTATEASTSNST

SEQ ID NO: 392 - DNA, 687 bp, Artificial Sequence
  Synthetic
gccaatcacaaagttacactaacaacggttacagttcaaacaataaaaaaccacactgaaaaaaacatcaccacctaccttactcaagtctcaccagaaagggttagctcatccatacaacctacaaccacatcaccaatccacacaaattcagctacaatatcaccaaatacaaaatcagaaacacaccatacaacaacacaagccaaaagcagaatcaccacttcaacacagaccaacaagccaagcacaaaatcacgttcaaaaaatccaccaaaaaaaccaaaagatgattaccattttgaagtgttcaattttgttccctgtagtatatgtggcaacaatcaactttgcaaatccatctgcaaaacaataccaagcaacaaaccaaagaaaaaaccaaccatcaaacccacaaacaaaccaaccgtcaaaaccacaaacaaaagagacccaaaaacaccagccaaaatgatgaaaaaagaaaccaccaccaacccaacaaaaaaaccaaccctcaagaccacagaaggagacaccagcacctcacaatccactgtgctcgacacaaccacatcaaaacacacaatccaacagcaatccctccactcaatcacctccgaaaacacacccaactccacacaaatacccacagcaaccgaggcctccacatcaaattctacttaa
